(19) United States
(12) Patent Application Publication
(10) Pub. No.: US 2017/0281788 A1
(43) Pub. Date: Oct. 5, 2017

(54) INCRETIN-INSULIN CONJUGATES

(71) Applicant: INDIANA UNIVERSITY RESEARCH AND TECHNOLOGY CORPORATION, INDIANAPOLIS, IN (US)

(72) Inventors: Richard D. DIMARCHI, Carmel, IN (US); John P. MAYER, Indianapolis, IN (US); David L. SMILEY, Bloomington, IN (US); Fa LIU, Zionsville, IN (US)

(21) Appl. No.: 15/513,748

(22) PCT Filed: Sep. 23, 2015
(86) PCT No.: PCT/US15/51728

§ 371 Date: Mar. 23, 2017

Related U.S. Application Data
(60) Provisional application No. 62/054,666, filed on Sep. 24, 2014.

(51) Int. Cl. A61K 47/48; A61K 38/28; C07K 19/00; A61K 38/22; C07K 14/575

(52) U.S. Cl. CPC A61K 47/48246; A61K 38/22; A61K 38/28; A61K 47/48061; C07K 14/575; C07K 2/00

(57) ABSTRACT

Disclosed herein are insulin agonist peptides conjugated to incretins wherein the incretin-insulin conjugate has agonist activity at the insulin receptor and the corresponding incretin receptor, and stimulates weight loss in an individual administered the compound.

### CROSS REFERENCE TO RELATED APPLICATIONS

[0001] This application claims priority under 35 U.S.C. §119(e) to U.S. Provisional Application Ser. No. 62/054,666 filed Sep. 24, 2014, the entirety of which is hereby incorporated by reference herein.

### INCORPORATION BY REFERENCE OF MATERIAL SUBMITTED ELECTRONICALLY

[0002] Incorporated by reference in its entirety is a computer-readable nucleotide/amino acid sequence listing submitted concurrently herewith and identified as follows: One 1014 KB ACII (Text) file named “242705_Seq List_ST25.txt” created on Sep. 18, 2015.

### BACKGROUND

[0003] Insulin is a proven therapy for the treatment of juvenile-onset diabetes and later stage adult-onset diabetes. The peptide is biosynthesized as a larger linear precursor of low potency (approximately 2% to 9% of native insulin), named proinsulin. Proinsulin is proteolytically converted to insulin by the selective removal of a 35-residue connecting peptide (C peptide). The resultant heteroduplex formed by disulfide links between the insulin “A chain” (SEQ ID NO: 1) and “B chain” (SEQ ID NO: 2) chain, representing a total of 51 amino acids, has high potency for the insulin receptor (nM range). Native insulin has approximately one hundredfold selective affinity for the insulin receptor relative to the related insulin-like growth factor 1 receptor, but demonstrates little selectively for the two different insulin receptor isoforms, named A & B.

[0004] Incretins are a group of gastrointestinal hormones that that are involved in a wide variety of physiological functions, including glucose homeostasis, insulin secretion, gastric emptying, and intestinal growth, as well as the regulation of food intake. Pre-proglucagon is a 158 amino acid precursor polypeptide that is processed in different tissues to form a number of different peptides. Incretins include a number of proglucagon-derived peptides, including glucagon (SEQ ID NO: 701), glucagon-like peptide-1 (GLP-1; amino acids 7-36 are provided as SEQ ID NO: 703 and amino acids 7-35 as SEQ ID NO: 704), glucagon-like peptide-2 (GLP-2; SEQ ID NO: 708) and oxyntomodulin (OXM; SEQ ID NO: 706).

[0005] Glucagon is a 29-amino acid peptide that corresponds to amino acids 33 through 61 of pre-proglucagon, while GLP-1 is produced as a 37-amino acid peptide that corresponds to amino acids 72 through 108 of pre-proglucagon. GLP-1(7-36) amide (SEQ ID NO: 703; the C terminus is an arginine amide) or GLP-1(7-37) acid (SEQ ID NO: 704; C terminus is a glycine) are biologically potent forms of GLP-1, that demonstrate essentially equivalent activity at the GLP-1 receptor.

[0006] Glucagon is a life-saving medicine that is used in the acute treatment of severe hypoglycemia. Oxyntomodulin has been reported to have pharmacological ability to suppress appetite and lower body weight. Clinical studies with GLP-1 receptor agonists or stabilized GLP-1 analogs have proven this family of peptides to be an effective treatment for Type II diabetes.

[0007] In addition, gastric inhibitory polypeptide (GIP) is also known as a glucose-dependent insulinotropic peptide, and is a member of the secretin family of hormones. GIP is derived from a 153-amino acid proprotein encoded by the GIP gene and circulates as a biologically active 42-amino acid peptide (SEQ ID NO: 707). The GIP gene is expressed in the small intestine as well as the salivary glands and is a weak inhibitor of gastric acid secretion. In addition to its inhibitory effects in the stomach, in the presence of glucose, GIP enhances insulin release by pancreatic beta islet cells when administered in physiological doses. GIP is believed to function as an enteric factor that stimulates the release of pancreatic insulin and that may play a physiological role in maintaining glucose homeostasis.

[0008] As disclosed herein conjugates are formed between an insulin peptide and an incretin, including for example a glucagon, GLP-1, or GIP agonist, a GLP-1/GIP co-agonist, a GLP-1/glucagon co-agonist or a glucagon/GLP-1/GIP triagonist, wherein the conjugate has agonist activity at both the insulin receptor and the corresponding incretin receptor. More particularly, the conjugation of a glucagon related peptide (e.g., GIP, GLP-1 or glucagon) is anticipated to produce a beneficial modification of the insulin peptide activity. For example, linking a peptide having agonist activity at the glucagon receptor to an insulin peptide is anticipated to enhance targeting of the conjugate to the liver since the glucagon receptor is predominately located in the liver. Targeting of the conjugate to the liver is desirable since the liver is primarily involved in glucose production not utilization. Thus targeting the liver may be a safer approach to shutting off glucose production than occurs when insulin contacts other tissues such as muscle or fat, where in addition to turning off glucose production it also stimulates glucose use leading to a higher risk of hypoglycemia. Also, there are glucagon receptors present on the alpha cells of the pancreas. Delivering the complex to the alpha cells may suppress additional glucagon production or make the alpha cell more sensitive to hypoglycemia. Applicants also anticipate that the presence of glucagon in the glucagon-insulin conjugates may serve as a buffer on the activity of the coupled insulin to provide a more baseline activity and thus avoid spikes in blood glucose levels.

[0009] Similarly, it is anticipated that conjugates of insulin peptides with other glucagon related peptides including the incretins GLP-1 and GIP and other related peptides having activity at the GLP-1 and/or GIP receptors will produce conjugates having beneficial properties. For example, GLP-insulin conjugate may be targeted to the hypothalamus, to decrease appetite as well as reduce blood glucose. Alternatively or additionally, the GLP-insulin conjugate may be targeted to the beta cells to drive anabolic response (increase islet beta cells' production of insulin).

[0010] The incretin-insulin peptide conjugates are also suitable for further structural enhancements that are envisioned to yield improved therapeutic index, through the use of prodrug chemistry; extended duration of action, by linkage of plasma proteins such as albumin, or other modifications, including pegylation and lipidation (e.g., addition of C14-C30 alkyl or acyl groups); and enhanced physical stability, by glycosylation. The preparation of single chain insulin analogs using a C-peptide linker also provides a novel structural location for where many of these chemical modifications can be successfully deployed. One use of the insulin conjugates disclosed herein would be in the treatment of diabetes while stimulating weight loss or preventing weight gain.

### SUMMARY

[0011] An insulin agonist/incretin conjugate is provided wherein the conjugate has agonist activity at both the insulin receptor and the corresponding incretin receptor. More particularly, in one embodiment an insulin agonist/incretin conjugate is provided wherein the conjugate has agonist activity at both the insulin receptor and at the GLP-1 and/or GIP receptor. In accordance with one embodiment a single compound is provide as a conjugate of an insulin protein and an incretin protein, wherein the conjugate acts as a full potency insulin agonist that induces weight loss or prevents weight gain. The insulin peptide component of the conjugate can be native insulin or any known insulin analog that has activity at the insulin receptor including for example any insulin peptide disclosed in published international applications WO96/34882, WO 2010/080607, WO 2010/080609, WO 2011/159882, WO/2011/159895 and U.S. Pat. No. 6,630,348, the disclosures of which are incorporated herein by reference. The incretin component of the conjugate can be any incretin peptide as disclosed herein including for example native glucagon, GLP-1, GIP or any known incretin or incretin peptide that has activity at one or more incretin receptors. Incretin peptides suitable for use in accordance with this disclosure include, for example, any incretin peptide disclosed in published international applications WO 2009/155258, WO 2009/058734, WO 2011/094337, WO 2009/148089, WO 2011/163473 and WO 2010/071807, the disclosures of which are expressly incorporated herein in their entirety.

[0012] In accordance with one embodiment an incretin peptide is linked to an insulin peptide via a linking moiety of the general structure of Formula I:

[chemical structure]

wherein R₁, R₂, R₃ and R₄ are independently selected from the group consisting of H, and C₁-C₃ alkyl;

[0013] Y is C, S, Se or S═O,

[0014] Z is C, S, Se, —S(C₁-C₃)(C₅-C₆ aryl)-, or Z in combination with Y is —C═C—, —O—N═, or a 1,2,3 triazole;

[0015] n is 0 or 1; and

[0016] m is 1, 2 or 3, with the proviso that when Y is S═O, Z is C. In one embodiment the linking moiety is a disulfide linker of the general formula:

[chemical structure]

wherein R₁, R₂, R₃ and R₄ are independently selected from the group consisting of H, and C₁-C₃ alkyl, n is 0 or 1, and m is 1, 2 or 3. In one embodiment n is 0, m is 2, R₄ is H and R₁, R₂ and R₃ are independently selected from the group consisting of H, and methyl.

[0017] In accordance with one embodiment conjugates formed by linking an incretin peptide to an insulin peptide, via a linking moiety of Formula I or II, are provided that demonstrate high potency, balanced activity at the respective receptors of the conjugate, glucose lowering capability and enhanced fat mass loss when injected in normal and diabetic model mice. In one embodiment the C-terminal region of the incretin peptides is covalently linked, via a linking moiety of Formula I or II, to the insulin peptide through a position independently selected from the side chain of an amino acid at a position selected from A9, A14 or A15 of the A chain, positions B1, B2, B3, B10, B22, B28 or B29 of the B chain, the N-terminal alpha amine of the B chain, the carboxy terminus of the A or B chain and at the side chain of an amino acid at any position of a linking moiety that links the A chain and B chain of a single chain insulin analog. In accordance with one embodiment the carboxy terminus of a incretin peptide is linked to the N-terminus of an insulin peptide via the disulfide linking moiety of Formula II, optionally wherein the carboxy terminus of a incretin peptide is linked to the N-terminus of the B chain of a two chain insulin peptide via the disulfide linking moiety of Formula II.

[0018] As used herein reference to the C-terminal region of the incretin peptide is intended to encompass the native C-terminus of a glucagon, GLP-1 or GIP peptide, or any amino acid added to the native C-terminus of a glucagon, GLP-1 or GIP analog, or the C-terminal amino acid of a glucagon analog that has been shortened by the deletion amino acids at the C-terminus, respectively, relative to the native glucagon sequence. For example the C-terminus of the native incretin peptide can be extended by 1 to 3 amino acids which are then linked to the insulin peptide either through the side chain of an amino acid of the C-terminal region or through the C-terminal carboxy group. In one embodiment the carboxy terminal region of the incretin peptide is covalently linked to the amino terminal region of the B chain of the insulin peptide.

[0019] In one embodiment the insulin peptide of the conjugate is a two chain insulin analog comprising an A chain and B chain linked to one another via disulfide bonds. In a further embodiment the conjugate comprises a two chain insulin analog wherein a incretin peptide is covalently linked to the insulin peptide at a position selected from the group consisting of the amino terminus of the B chain, the carboxy terminal region of the A chain, and the carboxy terminal region of the B chain. In one embodiment the incretin peptide is linked to the insulin peptide via a disulfide binding moiety of the general structure:

[chemical structure]

wherein R₁, R₂ and R₄ are independently selected from the group consisting of H, and CH₃; and n is 0 or 1.

[0020] In one embodiment the incretin peptide is selected from the group consisting of native glucagon, native GLP-1 and native GIP. In one embodiment the incretin peptide is a glucagon analog having activity at two or more incretin receptors selected from the glucagon receptor, the GLP-1 receptor or the GIP receptor. In one embodiment the incretin peptide component of the conjugate comprises

[0021] (i) the amino acid sequence:
[0022] X₁-X₂-Gln-Gly-Thr-Phe-Thr-Ser-Asp-Tyr-Ser-Lys-Tyr-Leu-Asp-Ser-Arg-Arg-Ala-Gln-Asp-Phe-Val-Gln-Trp-Leu-Met-Z (SEQ ID NO: 839) with 1 to 3 amino acid modifications thereto, wherein
[0023] X₁ and/or X₂ is a non-native (relative to SEQ ID NO: 701) amino acid that reduces susceptibility of the incretin peptide to cleavage by dipeptidyl peptidase IV (DPP-IV),
[0024] Z is selected from the group consisting of —COOH, -Asn-COOH, Asn-Thr-COOH, GPSSGAPPPS (SEQ ID NO: 78) and Y—COOH, wherein Y is 1 to 2 amino acids, and further wherein
[0025] (1) a lactam bridge connects the side chains of an amino acid at position i and an amino acid at position i+4, wherein i is 12, 16, 20 or 24 or
[0026] (2) one, two, three, or all of the amino acids at positions 16, 20, 21, and 24 of the incretin peptide is substituted with an α, α-disubstituted amino acid;

[0027] and said incretin peptide has glucagon agonist activity;

[0028] (ii) the amino acid sequence of SEQ ID NO: 701 modified to comprise at least one amino acid modification selected from the group consisting of:
[0029] substitution of Asn at position 28 with a charged amino acid;
[0030] substitution of Asn at position 28 with a charged amino acid selected from the group consisting of Lys, Arg, His, Asp, Glu, cysteic acid, and homocysteic acid;
[0031] substitution at position 28 with Asn, Asp, or Glu;
[0032] substitution at position 28 with Asp;
[0033] substitution at position 28 with Glu;
[0034] substitution of Thr at position 29 with a charged amino acid;
[0035] substitution of Thr at position 29 with a charged amino acid selected from the group consisting of Lys, Arg, His, Asp, Glu, cysteic acid, and homocysteic acid;
[0036] substitution at position 29 with Asp, Glu, or Lys;
[0037] substitution at position 29 with Glu;
[0038] insertion of 1-3 charged amino acids after position 29;
[0039] insertion after position 29 of Glu or Lys;
[0040] insertion after position 29 of Gly-Lys or Lys-Lys; or a combination thereof;
[0041] and at least one amino acid modification selected from Group A or Group B, or a combination thereof;

[0042] wherein Group A is an amino acid modification selected from the group consisting of substitution of Asp at position 15 with Glu, and substitution of Ser at position 16 with Thr or AIB; and

[0043] wherein Group B is an amino acid modification selected from the group consisting of:

[0044] substitution of His at position 1 with a non-native amino acid that reduces susceptibility of the incretin peptide to cleavage by dipeptidyl peptidase IV (DPP-IV),

[0045] substitution of Ser at position 2 with a non-native amino acid that reduces susceptibility of the incretin peptide to cleavage by dipeptidyl peptidase IV (DPP-IV),

[0046] substitution of Tyr at position 10 with Phe or Val;

[0047] substitution of Lys at position 12 with Arg;

[0048] substitution of Gln at position 20 with Ala or AIB;

[0049] substitution of Asp at position 21 with Glu;

[0050] substitution of Gln at position 24 with Ala or AIB;

[0051] substitution of Met at position 27 with Leu or Nle;

[0052] deletion of amino acids at positions 27-29;

[0053] deletion of amino acids at positions 28-29;

[0054] deletion of the amino acid at positions 29;

[0055] or a combination thereof;

[0056] and wherein said incretin peptide has glucagon agonist activity;

[0057] (iii) a incretin peptide of SEQ ID NO: 701, modified to comprise
[0058] (a) an amino acid modification at position 1 that confers GIP agonist activity,
[0059] (b) (1) a lactam bridge between the side chains of amino acids at positions i and i+4 or between the side chains of amino acids at positions j and j+3, wherein i is 12, 13, 16, 17, 20 or 24, and wherein j is 17, or
   [0060] (2) one, two, three, or all of the amino acids at positions 16, 20, 21, and 24 of the analog is substituted with an α,α-disubstituted amino acid,
[0061] (c) amino acid modifications at one, two or all of positions 27, 28 and 29, and
[0062] (d) 1-6 further amino acid modifications,

[0063] wherein the EC50 of the analog for GIP receptor activation is about 10 nM or less;

[0064] (iv) the sequence of X₁X₂X₃GTFTSDX₁₀SX₁₂YLX₁₅X₁₆X₁₇X₁₈AX₂₀X₂₁FX₂₃X₂₄WL X₂₇X₂₈X₂₉ (SEQ ID NO: 1926) wherein

[0065] X₁ is selected from the group consisting of His, D-His, (Des-amino)His, hydroxyl-His, acetyl-His, homo-His or alpha, alpha-dimethyl imidiazole acetic acid (DMIA), N-methyl His, alpha-methyl His, and imidazole acetic acid;

[0066] X₂ is selected from the group consisting of Ser, D-Ser, Ala, D-Ala, Val, Gly, N-methyl Ser, aminoisobutyric acid (Aib) and N-methyl Ala;

[0067] X₃ is selected from the group consisting of Gln, Glu, Orn and Nle;

[0068] X₁₀ is selected from the group consisting of Tyr, Val and Trp;

[0069] X₁₂ is selected from the group consisting of Ser, Lys and Arg;

[0070] X₁₅ is selected from the group consisting of Asp, Glu, cysteic acid, homoglutamic acid and homocysteic acid;

[0071] X₁₆ is selected from the group consisting of Ser, Gly, Glu, Gln, homoglutamic acid and homocysteic acid;

[0072] X₁₇ is selected from the group consisting of Arg, Gln, Lys, Cys, Orn, homocysteine and acetyl phenylalanine;

[0073] X₁₈ is selected from the group consisting of Arg, Ala, Lys, Cys, Orn, homocysteine and acetyl phenylalanine;

[0074] X₂₀ is selected from the group consisting of Gln, Lys, Arg, Orn and Citrulline;

[0075] X₂₁ is selected from the group consisting of Gln, Glu, Asp, Lys, Cys, Orn, homocysteine and acetyl phenylalanine;

[0076] X₂₃ is selected from the group consisting of Val and Ile;

[0077] X₂₄ is selected from the group consisting of Ala, Gln, Glu, Lys, Cys, Orn, homocysteine and acetyl phenylalanine;

[0078] X₂₇ is selected from the group consisting of Met, Val, Leu and Nle;

[0079] X₂₈ is selected from the group consisting of Asn, Lys and Asp; and

[0080] X₂₉ is selected from the group consisting of Thr, Gly, Lys, Cys, Orn, homocysteine and acetyl phenylalanine; or an analog of SEQ ID NO: 1926, wherein said analog differs from SEQ ID NO: 1926 by 1, 2 or 3 amino acid modifications, selected from positions 1, 2, 3, 5, 7, 10, 11, 13, 14, 17, 18, 19, 21, 24, 27, 28, and 29, wherein said incretin peptide exhibits at least 20% of the activity of native GLP-1 at the GLP-1 receptor;

[0081] (v) an amino acid that differs from SEQ ID NO: 701 by no more than ten amino acid modifications, comprising one or more amino acid substitutions with AIB at positions 16, 20, 21, and/or 24, and an amino acid modification at position 1 and/or 2 that provides reduced susceptibility to cleavage by dipeptidyl peptidase IV, wherein said incretin peptide exhibits at least 20% of the activity of native GLP-1 at the GLP-1 receptor. In one embodiment the incretin peptide comprises a peptide of any of (ii) through (v) wherein the peptide is further modified to comprise a C-terminal extension of GPSSGAPPPS (SEQ ID NO: 820).

[0082] In accordance with one embodiment the incretin component of the conjugate comprises the sequence X₁X₂X₃GTFX₇SDX₁₀SX₁₂YLX₁₅X₁₆X₁₇AAX₂₀X₂₁FVX₂₄WLLX₂₈X₂₉ (SEQ ID NO: 2029), wherein
[0083] X₁ is Tyr or His;
[0084] X₂ is Ser, D-serine, Ala, Val, glycine, N-methyl serine, aminoisobutyric acid (AIB), N-methyl alanine or D-alanine, optionally X₂ is Aib;
[0085] X₃ is Glu or Gln;
[0086] X₇ is Thr or Ile;
[0087] X₁₀ is Lys, Tyr or Val;
[0088] X₁₂ is Ser, Lys, Arg or Ile;
[0089] X₁₅ is Glu or Asp;
[0090] X₁₆ is Glu or Lys;
[0091] X₁₇ is Gln or Arg;
[0092] X₂₀ is Gln or Aib;
[0093] X₂₁ is Glu or Asp;
[0094] X₂₄ is Asn, Gln or Ala;
[0095] X₂₈ is Ala, Glu, Asp; and
[0096] X₂₉ is Ala or Gly.

[0097] In one embodiment the incretin component of the conjugate comprises a sequence selected from the group consisting of SEQ ID NO: 132, SEQ ID NO: 135, SEQ ID NO: 139 and SEQ ID NO: 140 or an analog thereof that differs from SEQ ID NO: 132, SEQ ID NO: 135, SEQ ID NO: 139 or SEQ ID NO: 140 by 1, 2, 3, 4 or 5 amino acid modifications. In one embodiment the incretin component of the conjugate comprises a sequence that differs from SEQ ID NO: 132, SEQ ID NO: 135, SEQ ID NO: 139 or SEQ ID NO: 140 by 1, 2 or 3 amino acid substitutions. In one embodiment the incretin component of the conjugate comprises a sequence selected from the group consisting of SEQ ID NO 1991-1995, 2000, 2001, 2007, 2008-2021 and 2024-2028. In one embodiment the incretin component of the conjugate comprises a sequence selected from the group consisting of SEQ ID NO: 2019, SEQ ID NO: 2021, SEQ ID NO: 2027 and SEQ ID NO: 2028 or an analog thereof that differs from SEQ ID NO: 2019, SEQ ID NO: 2021, SEQ ID NO: 2027 or SEQ ID NO: 2028 by 1, 2, 3, 4 or 5 amino acid modifications. In one embodiment the incretin component of the conjugate comprises a sequence selected from the group consisting of SEQ ID NO: 2019, 2021 and 2024-2028 or a sequence that differs from SEQ ID NO: 2019, 2021 or SEQ ID NO: 2024-2028 by 1, 2 or 3 amino acid substitutions. In one embodiment the incretin component of the conjugate comprises a sequence selected from the group consisting of SEQ ID NO: 2019 or 2021 or a sequence that differs from SEQ ID NO: 2019, 2021 or SEQ ID NO: 2024-2028 by 1, 2 or 3 amino acid modifications. In one embodiment the incretin component of the conjugate comprises or consists of a sequence selected from the group consisting of SEQ ID NO: 2019 or 2021. In one embodiment the incretin component of the conjugate comprises or consists of the sequence of SEQ ID NO: 2019. In one embodiment the incretin peptide comprises the sequence of SEQ ID NO: 2037 or 2038.

[0098] In one embodiment the insulin peptide of the conjugate comprises an A chain and a B chain wherein said A chain comprises a sequence GIVX₄X₅CCX₈X₉X₁₀CX₁₂LX₁₄X₁₅LX₁₇X₁₈YCX₂₁-R₁₃ (SEQ ID NO: 19), and said B chain comprises a sequence R₂₂-X₂₅LCGX₂₉X₃₀LVX₃₃X₃₄LYLVCGX₄₁X₄₂GFX₄₅ (SEQ ID NO: 20), wherein

[0099] X₄ is glutamic acid or aspartic acid;

[0100] X₅ is glutamine or glutamic acid

[0101] X₈ is histidine, threonine or phenylalanine;

[0102] X₉ is serine, arginine, lysine, ornithine or alanine;

[0103] X₁₀ is isoleucine or serine;

[0104] X₁₂ is serine or aspartic acid;

[0105] X₁₄ is tyrosine, arginine, lysine, ornithine or alanine;

[0106] X₁₅ is glutamine, glutamic acid, arginine, alanine, lysine, ornithine or leucine;

[0107] X₁₇ is glutamic acid, aspartic acid, asparagine, lysine, ornithine or glutamine;

[0108] X₁₈ is methionine, asparagine, glutamine, aspartic acid, glutamic acid or threonine;

[0109] X₂₁ is selected from the group consisting of alanine, glycine, serine, valine, threonine, isoleucine, leucine, glutamine, glutamic acid, asparagine, aspartic acid, histidine, tryptophan, tyrosine, and methionine;

[0110] X₂₅ is histidine or threonine;

[0111] X₂₉ is selected from the group consisting of alanine, glycine and serine;

[0112] X₃₀ is selected from the group consisting of histidine, aspartic acid, glutamic acid, homocysteic acid and cysteic acid;

[0113] X₃₃ is selected from the group consisting of aspartic acid and glutamic acid;

[0114] X₃₄ is selected from the group consisting of alanine and threonine;

[0115] X₄₁ is selected from the group consisting of glutamic acid, aspartic acid or asparagine;

[0116] X₄₂ is selected from the group consisting of alanine, ornithine, lysine and arginine;

[0117] X₄₅ is tyrosine or phenylalanine;

[0118] R₂₂ is selected from the group consisting of AYRPSE (SEQ ID NO: 14), FVNQ (SEQ ID NO: 12), FVKQ (SEQ ID NO: 8), PGPE (SEQ ID NO: 11), a tripeptide glycine-proline-glutamic acid, a tripeptide valine-asparagine-glutamine, a dipeptide proline-glutamic acid, a dipeptide asparagine-glutamine, glutamine, glutamic acid and an N-terminal amine; and

[0119] R₁₃ is COOH or CONH₂.

[0120] In one embodiment the insulin peptide of the conjugate comprises an A chain and a B chain wherein said A chain comprises a sequence of SEQ ID NO: 1, or an amino acid sequence that differs from SEQ ID NO: 1 by one, two or three amino acid substitutions, and the B chain comprises a sequence selected from the group consisting of FVNQHLCGSHLVEALYLVCGERGFFYTPKT (SEQ ID NO: 2) FVNQHLCGSHLVEALYLVCGERGFFYTKPT (SEQ ID NO: 9) FVNQHLCGSHLVEALYLVCGERGFFYTDKT (SEQ ID NO: 5) FVKQHLCGSHLVEALYLVCGERGFFYTEKT (SEQ ID NO: 6), or an amino acid sequence that differs from SEQ ID NO: 2, 5, 6, or 9 by one, two or three amino acid substitutions.

[0121] In one embodiment the conjugate comprises the incretin peptide of SEQ ID NO: 2019, 2021, SEQ ID NO: 2024-2028, 2037 or 2038 linked via its carboxy terminus to the amino terminus of an insulin peptide comprising an A chain of SEQ ID NO: 1 and a B chain of SEQ ID NO: 2, 5, 6, or 9 via a linker comprising the general structure of Formula IV:

[chemical structure]

wherein R₃ is H or CH₃.

[0122] In one embodiment the incretin-insulin conjugate comprises a hydrophilic moiety linked to the N-terminal alpha amine of the B chain or to the side chain of an amino acid at a position selected from the group consisting of A9, A14 and A15 of the A chain or positions B1, B2, B10, B24, B28 or B29 of the B chain or to a side chain of an amino acid of the linking moiety in a single chain insulin analog. Alternatively, or in addition, a hydrophilic moiety can be linked to the incretin peptide at any of amino acid positions 16, 20, 23, 24, 27, 30, 32, 43 or the C-terminal region. In one embodiment the side chain of one or two amino acids at positions selected from positions 24, 30 or 40 of the incretin peptide, or positions B24, B28 or B29 of the insulin peptide are linked to a hydrophilic moiety.

[0123] In one embodiment the hydrophilic moiety is a polyethylene chain and in a further embodiment the polyethylene chain is covalently bound to the side chain of an amino acid of the linking moiety of the insulin peptide component, when the insulin peptide is a single chain insulin analog. In one embodiment the hydrophilic moiety is an Fc peptide or other immunoglobulin peptide fragment. In one embodiment the insulin peptide is a single chain insulin wherein linking moiety joining the B and A chains comprises an amino acid sequence of no more than 17 amino acids in length and comprising the sequence GYGSSSRR (SEQ ID NO: 61), GAGSSSRR (SEQ ID NO: 1925) or GYGSSSRRAPQT; (SEQ ID NO: 23) In one embodiment the peptide linker joining the B and A chains is selected from the group consisting of SSSSKAPPPSLPSPSRLPGPSDTPILPQR (SEQ ID NO: 1922), SSSSRAPPPSLPSPSRLPGPSDTPILPQK (SEQ ID NO: 1923).

[0124] Acylation or alkylation can increase the half-life of the incretin-insulin conjugate peptides in circulation. Acylation or alkylation can advantageously delay the onset of action and/or extend the duration of action at the insulin receptors. The incretin-insulin conjugate peptides may be acylated or alkylated at the same amino acid position where a hydrophilic moiety is linked (including, for example at position 8 of the linking moiety joining a single chain insulin analog), or at a different amino acid position. In accordance with one embodiment the conjugates of the present invention are acylated at position 10, 16, 20, 30 and 40 of the incretin peptide or at position B28 or B29 of the insulin peptide. In one embodiment the conjugates of the present invention are acylated at position 10 or 40 of the incretin peptide or at position B29 of the insulin peptide, wherein the acylating moiety is of sufficient size to bind albumin in serum.

[0125] Also encompassed by the present disclosure are pharmaceutical compositions comprising the incretin-insulin conjugates and a pharmaceutically acceptable carrier. In accordance with one embodiment a pharmaceutical composition is provided comprising any of the incretin-insulin conjugates disclosed herein preferably at a purity level of at least 90%, 91%, 92%, 93%, 94%, 95%, 96%, 97%, 98% or 99%, and a pharmaceutically acceptable diluent, carrier or excipient. Such compositions may contain a single chain insulin agonist peptide as disclosed herein at a concentration of at least 0.5 mg/ml, 1 mg/ml, 2 mg/ml, 3 mg/ml, 4 mg/ml, 5 mg/ml, 6 mg/ml, 7 mg/ml, 8 mg/ml, 9 mg/ml, 10 mg/ml, 11 mg/ml, 12 mg/ml, 13 mg/ml, 14 mg/ml, 15 mg/ml, 16 mg/ml, 17 mg/ml, 18 mg/ml, 19 mg/ml, 20 mg/ml, 21 mg/ml, 22 mg/ml, 23 mg/ml, 24 mg/ml, 25 mg/ml or higher. In one embodiment the pharmaceutical compositions comprise aqueous solutions that are sterilized and optionally stored within various package containers. In other embodiments the pharmaceutical compositions comprise a lyophilized powder. The pharmaceutical compositions can be further packaged as part of a kit that includes a disposable device for administering the composition to a patient. The containers or kits may be labeled for storage at ambient room temperature or at refrigerated temperature.

[0126] In accordance with one embodiment an improved method of regulating blood glucose levels in insulin dependent patients while increasing weight loss or preventing weight gain is provided. The method comprises the steps of administering to a patient an incretin-insulin conjugate, wherein the carboxy terminus of the incretin is linked to the amino terminus of the insulin peptide by a spacer having the general structure of Formula I, II, III or IV, in an amount therapeutically effective for the control of diabetes.

### BRIEF DESCRIPTION OF THE DRAWINGS

[0127] FIGS. 1A & 1B are graphs demonstrating the activity of a GLP-1/insulin fusion (GLP-DP8 (HAEGTFTSDVSSYLEEQAAREFIAWLVRGRG-GPEHLCGAHLVDALYLVCGDRGFYFNDRGAGSSSRRGIVDECCHRSCDLRRLENYC N; SEQ ID NO: 700); ▪, comprising a GLP-1 agonist peptide fused the N-terminus of a single chain insulin analog relative to non-conjugated insulin analogs: DP25M GPEHLCGAHLVDALYLVCGDRGFYFNDRGAGSSSRR GIVDECCHRSCDLRRLENYCN; SEQ ID NO: 145; ▴), DP30 (▾); and DP31 (♦) and [symbol] native insulin ( [symbol] ) at the insulin subtype A (FIG. 1A) and the insulin subtype B (FIG. 1B) receptors. The fusion peptide has a potency of about 2.07 nanomoles at the A receptor and about 9.9 nanomoles at the insulin B receptor. The activity of these compounds is significantly less than native insulin (as well as other non-conjugated insulin analogs) which has a potency of about 0.5 and 0.76 at the respective A and B receptors.

[0128] FIG. 2 provides the general structure of linkers suitable for use in joining an incretin to an insulin peptide to form a conjugate in accordance with the present disclosure. Each of the disclosed structures is suitable for use in coupling any incretin disclosed herein to any insulin as disclosed herein. As designated in FIG. 2, the [0.0] structure is also known as “the cysteine disulfide linkage” and the designated [2,0] structure is also known as “the penicillamine disulfide linkage”.

[0129] FIG. 3 provides additional linkers that can be used to prepare the generic structures of incretin-insulin conjugates.

[0130] FIGS. 4A-4D provides a synthetic scheme for synthesizing incretin and insulin fusion peptides.

[0131] FIGS. 5A & 5B are graphs demonstrating the in vitro activity of a GLP-1/insulin fusion peptide (IUB48, SEQ ID NO: 1932) FIG. 5A) and a glucagon/insulin fusion peptide (IUB496, SEQ ID NO: 521; FIG. 5B) at the insulin subtype B receptor. The fusion peptides differ based on the spacer joining the incretin and the insulin and are prepared using a disulfide linker, including cysteine (), homocysteine (▴), penicillamine (▾), and desHis with a cystesine linker ( [symbol] ). Insulin (▪) is included as well as IGF-1 ( [symbol] ). DesHIUB48C is an incretin modified by the removal of the N-terminal histidine amino acid eliminating incretin activity. All incretin-insulin fusions were found to have high potency at the insulin receptor, similar to that of native insulin. Therefore, the linker provides full potency regardless of fusing a GLP peptide (FIG. 5A) or a glucagon peptide (FIG. 5B).

[0132] FIGS. 6A & 6B are graphs demonstrating the in vitro activity of a GLP-1/insulin fusion peptide (IUB48, FIG. 6A) and a glucagon/insulin fusion peptide (IUB496, FIG. 6B) at the respective GLP-1 receptor and the glucagon receptor, wherein the GLP-1 sequence is HXEGTFTSDVSSYLEEQAAKEFIAWLVKGGPSSGAPPPS (SEQ ID NO: 1932) and the glucagon sequence is HSQTFTSDYSKYLDSRRAQDFVQWLMNTGPSSGAPPPS (SEQ ID NO: 521) and the insulin peptide is native insulin. The fusion peptides differ based on the spacer joining the incretin and the insulin and are prepared using a disulfide linker, including cysteine (), homocysteine (▴), and penicillamine (▾) and desHis with a cysteine linker ( [symbol] ). Glucagon (▪) is included as well as IGF-1( [symbol] ). DesHiUB48C-insulin is an incretin modified by the removal of the N-terminal histidine amino acid, thus eliminating incretin activity. All incretin-insulin fusions were found to have high potency at the GLP-1 and glucagon receptors, with the exception of DesHiUB48C-insulin which due to the deletion of the N-terminal histidine residue would not be expected to have activity at the GLP-1 and glucagon receptors. The GLP-1-insulin conjugates also show little activity at the glucagon receptor due to the fact that GLP-1 has very little activity at the glucagon receptor. Therefore, the incretin-insulin conjugates demonstrate full potency for the GLP-1 or glucagon agonist component of the incretin-insulin conjugate at their respective receptors.

[0133] FIG. 7 demonstrates the relative stability of the incretin-insulin conjugate in plasma. Incretin-insulin conjugates formed using a cysteine or a penicillamine linker were incubated for 72 hours in plasma, no significant degradation occurs and no differences were detected between the two linkers used.

[0134] FIG. 8 is a graph demonstrating the results of administering a 50 nmoles/kg dose of an incretin-insulin conjugate to normal mice. IUB-48 is a GLP-1 agonist that will lower blood glucose levels to about 60 mg/dL. When IUB-48 is linked to native insulin via cysteine (♦), penicillamine () or homocysteine (▪), the conjugates all drop blood glucose levels to levels below that achieved with IUB-48 as the sole active agent.

[0135] FIGS. 9A-9B provide the results of an experiment conducted on normal mice administered a 20 nmoles/kg dose of an incretin-insulin conjugate, wherein either the incretin or the insulin component has been modified to eliminate either GLP-1 or insulin peptide activity. FIG. 9A provides a schematic representation of the experimental procedure. CIU-001 is a GLP-1/insulin conjugate (wherein the GLP-1 peptide consists of the sequence of SEQ ID NO: 1932 and the insulin peptide is native insulin), CIU-004 is CIU-001 modified to remove the N-terminal histidine (SEQ ID NO: 1081) destroying incretin receptor binding activity) and CIU-014 is CIU-001 wherein the C-terminus of the B chain is linked directly to the N-terminus of the A chain via a minipeg (destroying insulin activity). FIG. 9B is a graph presenting the results, wherein CIU-004 and CIU-001 (having insulin activity) are fully potent in reducing blood glucose to below 50 mg/dL, wherein the compound lacking insulin activity can only reduce blood glucose to about 60 mg/dL activity, consistent with GLP-1 activity. Thus the conjugates retain the activity of both peptides even when fused together in accordance with this disclosure.

[0136] FIGS. 10A-10D: FIG. 10A provides the locations where the incretin-insulin conjugates [comprising an incretin of: HXEGTFTSDVSSYLEEQAAREFIAWLVRGGPSSGAPPPSXC (SEQ ID NO: 2029); HXEGTFTSDXSSYLEEQAAREFIAWLVRGGPSSGAPPPSC SEQ ID NO: 2030); HXEGTFTSDVSSYLEEQAAREFIAWLVRGGPSSGAPPPSC (SEQ ID NO 2031); and HXEGTFTSDXSSYLEEQAAREFIAWLVRGGPSSGAPPPSXC (SEQ ID NO: 2032) linked to native insulin (having an A chain of SEQ ID NO: 1 and a B chain of SEQ ID NO: 2) via a disulfide linker (—(S—S)—CH₂ CH₂ CH₂—) wherein the linker extends from the C-terminal cysteine added to the incretin and is covalently bound to the N-terminal amine of the insulin B chain] can be further modified to link an acyl or alkyl group or a polyethylene chain to extend the duration of action of the underlying incretin-insulin conjugate. FIGS. 10B and 10C provide synthetic schemes for preparing the acyl or pegylated incretin-insulin conjugates, respectively. FIG. 10D provides the activity of the acylated incretin-insulin conjugates at the GLP-1, GIP and insulin receptors wherein a native two chain insulin is linked to an incretin selected from the group consisting of HXEGTFTSDVSSYLEEQAAKEFIAWLVKGGPSSGAPPPSC (SEQ ID NO 2033); HXEGTFTSDK(rEC16)SSYLEEQAAKEFIAWLVKGGPSSGAPPPSGC (SEQ ID NO: 2034) and HXEGTFTSDVSSYLEEQAAKEFIAWLVKGGPSSGAPPPSGK(rEC16)C (SEQ ID NO: 2035)

[0137] FIGS. 11A-11B provide the results of an experiment conducted on diabetic mice administered a 5, 15 or 20 nmoles/kg dose of an incretin-insulin conjugate (HXEGTFTSDVSSYLEEQAAKEFIAWLVKGGPSSGAPPPSUC (SEQ ID NO: 1927)—(S—S)—CH₂CH₂CH₂—B1 insulin (CIU-013)), wherein the incretin moiety has been acylated at the lysine amino acid side chain at position 40. In particular, the “U” of SEQ ID NO: 1927 represents a lysine acylated with a C16 acyl group via a gamma glutamic acid linker (Lys(γ-Glu-C16)). FIG. 11A provides a schematic representation of the experimental procedure. FIG. 11B is a graph presenting the results, wherein all doses of the compound are effective in lowering blood glucose. FIG. 11C is a graph measuring initial blood glucose levels and the change in blood glucose after administration of the compound. Both FIGS. 11B and 11C demonstrate the lipidated incretin-insulin conjugates are very potent compounds.

[0138] FIGS. 12A & 12B provide the results of an experiment administering a second dose of the incretin-insulin conjugate (HXEGTFTSDVSSYLEEQAAKEFIAWLVKGGPSSGAPPPSUC (SEQ ID NO: 1927)—(S—S)—CH₂CH₂CH₂—B1Insulin (CIU-013)), to diabetic mice fed 6 hours after administration of the first dose. FIG. 12A provides a schematic representation of the experimental procedure. FIG. 12B is a graph presenting the results wherein a second administration of the conjugate at 6 hours (CIU-13 10 nmole/kg(×2) helps lower the 24 hour blood glucose and keep it at about 100 mg/dL, whereas mice not administered a second dose continue to experience increased blood glucose levels.

[0139] FIG. 13 is a bar graph demonstrating that the incretin-insulin conjugate (HXEGTFTSDVSSYLEEQAAKEFIAWLVKGGPSSGAPPPSUC (SEQ ID NO: 1927)—(S—S)—CH₂CH₂CH₂—B1Insulin (CIU-013)), is suppressing food intake wherein pegylated insulin does not. Accordingly the GLP-1 based incretin-insulin conjugates have activity in lowering blood glucose levels as well as reduce food intake since they have the activity of both GLP-1 and insulin.

[0140] FIGS. 14A-14D provide the results of an experiment conducted on diabetic mice administered a pegylated native insulin or the incretin-insulin conjugate (HXEGTFTSDVSSYLEEQAAKEFIAWLVKGGPSSGAPPPSUC (SEQ ID NO: 1927)—(S—S)—CH₂CH₂CH₂—B1Insulin (CIU-013)), over the course of four days. The acylated CIU-13 conjugate was administered either daily or twice a day. FIG. 14A provides a schematic representation of the experimental procedure. FIG. 14B is a graph presenting the results, wherein the pegylated insulin failed to induce weight loss when administered either daily or twice a day, but the acylated CIU-13 conjugate produced significant weight loss. FIG. 14C is a graph demonstrating that the acylated CIU-13 conjugate suppresses food intake relative to the administration of the pegylated insulin analog. FIG. 14D is a graph displaying the blood glucose of the mice after administration of the acylated CIU-13 conjugate (daily or 2× a day) or administration of the pegylated insulin analog (daily or 2× a day). The acylated CIU-13 conjugate is administered at one fifth the dosage of the pegylated insulin yet would appear to not be as effective as insulin.

[0141] FIGS. 15A-15C provide the results of an experiment conducted on diabetic mice administered four different acylated GLP-1/insulin conjugates. Two of the compounds are acylated at position 10 (CIU-12 (SEQ ID NO: 1953 and CIU-21 (SEQ ID NO: 1958) and two of the compounds are acylated at position 40 (CIU-13, SEQ ID NO: 1954; and CIU-22, SEQ ID NO: 1959). The spacer linking the incretin to the insulin is also different between the compounds with a cysteine disulfide linkage for CIU-12 and CIU-13 and a penicillamine disulfide linkage for CIU-21 and CIU-22. FIG. 15A provides a schematic representation of the experimental procedure. FIG. 15B is a graph presenting the results, wherein all compounds demonstrate activity in reducing blood glucose levels and demonstrate an extended duration of action relative to native insulin. FIG. 15C is a bar graph presenting the area under the curve. The results indicate a greater duration of action achieved with acylation at position 10 relative to acylation at position 40. No significant difference is seen between the cysteine disulfide linkage relative to the penicillamine disulfide linkage.

[0142] FIG. 16A-16C provide the results of an experiment conducted on diabetic mice administered three different doses (5, 10 or 20 nmol/kg) of a pegylated GLP-1/insulin conjugate (CIU-037). CIU-037 (SEQ ID NO: 1966) is pegylated with a 20K PEG at position 40 of the GLP-1 moiety. CUI-023 (SEQ ID NO: 1960) is pegylated with a 20K PEG at B29 of the insulin component. Animals were also administered 20 nmol/kg of a pegylated native insulin (20 K PEG linked to the B29 side chain). FIG. 16A provides a schematic representation of the experimental procedure. FIG. 16B is a graph presenting the results of the dose titration, with blood glucose levels inversely proportional to the dose administered. The pegylated GLP-1/insulin conjugates drop blood glucose levels more quickly and have a longer duration of action than the pegylated insulin (CIU-26). FIG. 16C is a bar graph indicating that the GLP-1 containing pegylated conjugates suppress food intake whereas the pegylated insulin analog did not.

[0143] FIGS. 17A-17E provide the results of an experiment conducted on diabetic mice administered three different doses (1, 2.5 or 5 nmol/kg) of a pegylated GLP-1/insulin conjugate (CIU-037). CIU-037 is pegylated with a 20K PEG at position 40 of the GLP-1 moiety. Animals were also administered 20 nmol/kg of a pegylated native insulin (20 K PEG linked to the B29 side chain). FIG. 17A provides a schematic representation of the experimental procedure where animals were monitored over the course of seven days. FIG. 17B is a graph presenting the results of the dose titration, with improved blood glucose levels achieved relative to pegylated insulin and using less than 5% the dose. FIG. 17C is a graph demonstrating the ability of CIU-037 to suppress food intake, whereas CIU-26, the pegylated insulin does not. FIG. 17D is a graph presenting data demonstrating CIU-037, but not CIU-26, induces loss in body weight. FIG. 17E is a series of bar graphs indicating that the weight loss induced by CIU-037 comes from fat mass and not lean mass.

[0144] FIGS. 18A-18C provide the results of an experiment conducted on diabetic mice administered three different homodimers of GLP-1/insulin conjugates (CIU-070, SEQ ID NO: 1980; CIU-071, SEQ ID NO: 1981; and CIU-072, SEQ ID NO: 1982) relative to GLP-1/insulin conjugate monomers (CIU-037, SEQ ID NO: 1966; CIU-056, SEQ ID NO: 1975; CIU-057, SEQ ID NO: 1976). The CIU-072 conjugates are linked to form a dimer by a disulfide through a thiol that is added to the side-chain of the Lys40 in the GLP-agonist. The thiol is derived from cystamine (des-amino, Cys) that forms an amide bond through its carboxyl group to the amine of lysine. The CIU-070 and CIU-071 conjugates are linked to form a dimer by a bifunctional peg polymer at both ends. There is an amide bond formed between the side-chain lysine and the peg-polymer through N-hydroxysuccinimide mediated amide bond formation. The CIU-056 and CIU-057 peptides are monomers that are doubly pegylated with two 20 kd Pegs at the same positions K24 & K40 of the GLP-1 sequence. CIU-037 is pegylated with a 20K PEG at position 40 of the GLP-1 moiety. FIG. 18A provides a schematic representation of the experimental procedure. FIG. 18B is a graph presenting the results of the relative glucose lowering of each dimer. FIG. 18C is a graph presenting the results of the relative glucose lowering of each dimer as presented based on change in initial blood glucose to blood glucose levels after administration.

[0145] FIGS. 19A-19C provide the results of an experiment conducted on diabetic mice administered two different prodrug forms of an insulin prodrug (CIU-035 and CIU-036) wherein a self-cleaving dipeptide element (Aib, N-Me-dLys for CIU-035 and Sar,alpha-MeLys for CIU-036) is linked to the N-terminus of CIU-035/CIU-036. For CIU-035, the dipeptide element is linked via a disulfide linker of formula II to the B1 of insulin. For CIU-036, the dipeptide element is linked via direct amide bond to the B1 amine nitrogen. The dipeptide element has an acyl group of C22 or C18 linked to the lysine side chain of the dipeptide element. FIG. 19A provides a schematic representation of the experimental procedure wherein CIU-035 and CIU-036 are administered at two different doses 10 and 50 nmol/kg. FIG. 18B is a graph presenting the results of the relative glucose lowering of each prodrug relative to native insulin. The insulin prodrugs administered at 50 nmol/kg demonstrate rapid blood glucose lowering and have an extended duration of action relative to insulin. FIG. 19C is a graph presenting the first six hours after administering the prodrugs. This graph more clearly represents the extended duration of action of the prodrug form of the lipidated insulin prodrug relative to insulin.

[0146] FIG. 20 is a bar graph showing the dose titration of incretin insulin conjugate CIU-079 (native insulin, GIP-GLP Co-agonist increlin; see Table 4) on food intake. CIU-079 exhibits activity at each of the GIP, GLP-1 and insulin receptors.

[0147] FIG. 21 is a bar graph showing the dose titration of incretin-insulin conjugate CIU-085 (des-Di, GIP-GLP Co-agonist increlin; see Table 4) on food intake. The des-Di insulin analog is an insulin single chain formed by fusing a modified B chain terminus (B27 and B29 deleted) directly to the N-terminus of the A chain. This insulin analog is inactive at the insulin receptor. CIU-085 exhibits activity at each of the GIP and GLP-1 receptors, but not at the insulin receptor.

[0148] FIG. 22 is a bar graph showing the dose titration of incretin insulin conjugate CIU-093 (native insulin, des-Tyr1, GIP-GLP Co-agonist increlin; see Table 4) on food intake. The des-Tyr1glucagon analog is inactive at the GLP-1 and GIP receptors. CIU-085 exhibits activity only at the insulin receptor and not at either of the GIP and GLP-1 receptors. This conjugate has no incretin activity and therefore does not suppress food intake.

[0149] FIG. 23 is a graph showing the dose titration of incretin insulin conjugate CIU-079 (native insulin, GIP-GLP Co-agonist increlin; see Table 4) on blood glucose.

[0150] FIG. 24 is a graph showing the dose titration of incretin insulin conjugate CIU-085 (des-Di, GIP-GLP Co-agonist increlin; see Table 4) on blood glucose.

[0151] FIG. 25 is a graph showing the dose titration of incretin insulin conjugate CIU-093 (native insulin, des-Tyr1, GIP-GLP Co-agonist increlin; see Table 4) on blood glucose. Without the incretin activity a much higher dosage is required to get the same glucose lowering as seen with CIU-079 and CIU-085.

[0152] FIG. 26 is a graph of a glucose tolerance test conducted on wild type mice (solid lines) and on GPL-1 receptor knock out mice (dashed lines). Mice were administered either a 1 nmol/kg or 3 nmol/kg dose of incretin insulin conjugate CIU-079 two hours prior to a glucose challenge. The data demonstrates that these compounds have both incretin activities (GLP-1 and GIP activity) as they are fully functional in wild type and lose activity in GLP-1 knock out mice, but that lost activity can be overcome by increased dosage.

[0153] FIG. 27 is a graph of a glucose tolerance test conducted on wild type mice (solid lines) and on GPL-1 receptor knock out mice (dashed lines). Mice were administered either a 1 nmol/kg or 3 nmol/kg dose of incretin insulin conjugate CIU-085 two hours prior to a glucose challenge. The data demonstrates that these compounds have both incretin activities GLP-1 and GIP activity as they are fully functional in wild type and lose activity in GLP-1 knock out mice but that can be overcome by increased dosage.

[0154] FIG. 28 is a bar graph demonstrating the effect of various incretin insulin conjugates (CIU-079, CIU-085 and CIU-093) on food intake (FI measured in grams) when administered at a dosage of 3 nmol/kg to either wild type mice or GPL-1 receptor knock out mice. Food intake is regulated by GLP-1 so in the GLP-1 knock out mice no reduction in food intake is seen for any of the administered compounds, however CIU-079 and CIU-085, but not CIU-093 suppresses food intake in wild type mice.

[0155] FIG. 29 is a graph demonstrating the effect of various incretin-insulin conjugates (CIU-079, CIU-085 and CIU-093) on blood glucose when administered at a dosage of 3 nmol/kg to wild type mice.

[0156] FIG. 30 is a graph demonstrating the effect of various incretin-insulin conjugates (CIU-079, CIU-085 and CIU-093) on blood glucose when administered at a dosage of 3 nmol/kg to GPL-1 receptor knock out mice.

[0157] FIG. 31 is a bar graph demonstrating the effect of various incretin insulin conjugates (CIU-079, CIU-085 and CIU-093) on food intake (FI measured in grams) when administered at a dosage of 10 nmol/kg to either wild type mice or GPL-1 receptor knock out mice.

[0158] FIG. 32 is a graph demonstrating the effect of various incretin-insulin conjugates (CIU-079, CIU-085 and CIU-093) on blood glucose when administered at a dosage of 10 nmol/kg to wild type mice.

[0159] FIG. 33 is a graph demonstrating the effect of various incretin-insulin conjugates (CIU-079, CIU-085 and CIU-093) on blood glucose when administered at a dosage of 10 nmol/kg to GPL-1 receptor knock out mice.

[0160] FIG. 34 is a graph demonstrating the effect of various incretin-insulin conjugates (CIU-079, CIU-082, CIU 190, CIU 191, CIU 192 and CIU-225) on blood glucose when administered at a dosage of 3 nmol/kg to diet induced obesity (DIO) mice.

[0161] FIGS. 35A and 35B are graphs measuring the blood glucose levels (FIG. 35A) and peptide C levels (FIG. 35B) in monkeys infused with glucose (to drive glucose levels up—GLP-1 and GIP responses only seen with elevated blood glucose) and administered CIU 085 subcutaneously at one of two doses (3 nmol/kg or 10 nmol/kg). CIU 085 which lacks insulin activity is able to induce C-peptide production (a marker for insulin production), thus demonstrating these compounds have incretin activity in monkeys.

[0162] FIG. 36 is a graph measuring the blood glucose levels in normal mini-pigs administered CIU 085 or CIU079 subcutaneously at a dose of 3 nmol/kg. This demonstrates that CIU-079 has insulin activity and lowers blood glucose, whereas CIU-085's ability to lower blood glucose is minimal even though it has GLP-1 and GIP activity.

[0163] FIG. 37 is a graph measuring the blood insulin levels in normal mini-pigs administered CIU 085 or CIU079 subcutaneously at a dose of 3 nmol/kg. This demonstrates that CIU-079 gets cleared as it is active at the insulin receptor; whereas CIU-085 which is not active at the insulin receptor is not cleared and continues to induce insulin production.

### DETAILED DESCRIPTION

### Definitions

[0164] In describing and claiming the invention, the following terminology will be used in accordance with the definitions set forth below.

[0165] The term “about” as used herein means greater or lesser than the value or range of values stated by 10 percent, but is not intended to designate any value or range of values to only this broader definition. Each value or range of values preceded by the term “about” is also intended to encompass the embodiment of the stated absolute value or range of values.

[0166] As used herein the term “amino acid” encompasses any molecule containing both amino and carboxyl functional groups, wherein the amino and carboxylate groups are attached to the same carbon (the alpha carbon). The alpha carbon optionally may have one or two further organic substituents. For the purposes of the present disclosure designation of an amino acid without specifying its stereochemistry is intended to encompass either the L or D form of the amino acid, or a racemic mixture. However, in the instance where an amino acid is designated by its three letter code and includes a superscript number, the D form of the amino acid is specified by inclusion of a lower case d before the three letter code and superscript number (e.g., dLys⁻¹), wherein the designation lacking the lower case d (e.g., Lys⁻¹) is intended to specify the native L form of the amino acid. In this nomenclature, the inclusion of the superscript number designates the position of the amino acid in the insulin analog sequence, wherein amino acids that are located within the insulin analog sequence are designated by positive superscript numbers numbered consecutively from the N-terminus. Additional amino acids linked to the insulin analog peptide either at the N-terminus or through a side chain are numbered starting with 0 and increasing in negative integer value as they are further removed from the insulin analog sequence.

[0167] As used herein the term “hydroxyl acid” refers to amino acids that have been modified to replace the alpha carbon amino group with a hydroxyl group.

[0168] As used herein the term “non-coded amino acid” encompasses any amino acid that is not an L-isomer of any of the following 20 amino acids: Ala, Cys, Asp, Glu, Phe, Gly, His, Ile, Lys, Leu, Met, Asn, Pro, Gln, Arg, Ser, Thr, Val, Trp, Tyr.

[0169] A “bioactive polypeptide” refers to polypeptides which are capable of exerting a biological effect in vitro and/or in vivo.

[0170] As used herein a general reference to a peptide is intended to encompass peptides that have modified amino and carboxy termini. For example, an amino acid sequence designating the standard amino acids is intended to encompass standard amino acids at the N- and C-terminus as well as a corresponding hydroxyl acid at the N-terminus and/or a corresponding C-terminal amino acid modified to comprise an amide group in place of the terminal carboxylic acid.

[0171] As used herein an “acylated” amino acid is an amino acid comprising an acyl group which is non-native to a naturally-occurring amino acid, regardless by the means by which it is produced. Exemplary methods of producing acylated amino acids and acylated peptides are known in the art and include acylating an amino acid before inclusion in the peptide or peptide synthesis followed by chemical acylation of the peptide. In some embodiments, the acyl group causes the peptide to have one or more of (i) a prolonged half-life in circulation, (ii) a delayed onset of action, (iii) an extended duration of action, (iv) an improved resistance to proteases, such as DPP-IV, and (v) increased potency at the IGF and/or insulin peptide receptors.

[0172] As used herein, an “alkylated” amino acid is an amino acid comprising an alkyl group which is non-native to a naturally-occurring amino acid, regardless of the means by which it is produced. Exemplary methods of producing alkylated amino acids and alkylated peptides are known in the art and including alkylating an amino acid before inclusion in the peptide or peptide synthesis followed by chemical alkylation of the peptide. Without being held to any particular theory, it is believed that alkylation of peptides will achieve similar, if not the same, effects as acylation of the peptides, e.g., a prolonged half-life in circulation, a delayed onset of action, an extended duration of action, an improved resistance to proteases, such as DPP-IV, and increased potency at the IGF and/or insulin receptors.

[0173] As used herein, the term “pharmaceutically acceptable carrier” includes any of the standard pharmaceutical carriers, such as a phosphate buffered saline solution, water, emulsions such as an oil/water or water/oil emulsion, and various types of wetting agents. The term also encompasses any of the agents approved by a regulatory agency of the US Federal government or listed in the US Pharmacopeia for use in animals, including humans.

[0174] As used herein the term “pharmaceutically acceptable salt” refers to salts of compounds that retain the biological activity of the parent compound, and which are not biologically or otherwise undesirable. Many of the compounds disclosed herein are capable of forming acid and/or base salts by virtue of the presence of amino and/or carboxyl groups or groups similar thereto.

[0175] Pharmaceutically acceptable base addition salts can be prepared from inorganic and organic bases. Salts derived from inorganic bases, include by way of example only, sodium, potassium, lithium, ammonium, calcium and magnesium salts. Salts derived from organic bases include, but are not limited to, salts of primary, secondary and tertiary amines.

[0176] Pharmaceutically acceptable acid addition salts may be prepared from inorganic and organic acids. Salts derived from inorganic acids include hydrochloric acid, hydrobromic acid, sulfuric acid, nitric acid, phosphoric acid, and the like. Salts derived from organic acids include acetic acid, propionic acid, glycolic acid, pyruvic acid, oxalic acid, malic acid, malonic acid, succinic acid, maleic acid, fumaric acid, tartaric acid, citric acid, benzoic acid, cinnamic acid, mandelic acid, methanesulfonic acid, ethanesulfonic acid, p-toluene-sulfonic acid, salicylic acid, and the like.

[0177] As used herein, the term “hydrophilic moiety” refers to any compound that is readily water-soluble or readily absorbs water, and which are tolerated in vivo by mammalian species without toxic effects (i.e. are biocompatible). Examples of hydrophilic moieties include polyethylene glycol (PEG), polylactic acid, polyglycolic acid, a polylactic-polyglycolic acid copolymer, polyvinyl alcohol, polyvinylpyrrolidone, polymethoxazoline, polyethyloxazoline, polyhydroxyethyl methacrylate, polyhydroxypropyl methacrylamide, polymethacrylamide, polydimethylacrylamide, and derivatised celluloses and starches such as hydroxymethylcellulose, hydroxymethylstarchm, hydroxyethylstarch, or hydroxyethylcellulose and co-polymers thereof, as well as natural polymers including, for example, Fc, albumin, and other polypeptides, heparin and dextran.

[0178] As used herein, the term “treating” includes prophylaxis of the specific disorder or condition, or alleviation of the symptoms associated with a specific disorder or condition and/or preventing or eliminating said symptoms. For example, as used herein the term “treating diabetes” will refer in general to maintaining glucose blood levels near normal levels and may include increasing or decreasing blood glucose levels depending on a given situation.

[0179] As used herein an “effective” amount or a “therapeutically effective amount” of an insulin analog refers to a nontoxic but sufficient amount of an insulin analog to provide the desired effect. For example one desired effect would be the prevention or treatment of hyperglycemia. The amount that is “effective” will vary from subject to subject, depending on the age and general condition of the individual, mode of administration, and the like. Thus, it is not always possible to specify an exact “effective amount.” However, an appropriate “effective” amount in any individual case may be determined by one of ordinary skill in the art using routine experimentation.

[0180] The term, “parenteral” means not through the alimentary canal but by some other route such as intranasal, inhalation, subcutaneous, intramuscular, intraspinal, or intravenous.

[0181] Throughout the application, all references to a particular amino acid position by letter and number (e.g. position A5) refer to the amino acid at that position of either the A chain (e.g. position A5) or the B chain (e.g. position B5) in the respective native human insulin A chain (SEQ ID NO: 1) or B chain (SEQ ID NO: 2), or the corresponding amino acid position in any analogs thereof. For example, a reference herein to “position B28” absent any further elaboration would mean the corresponding position B27 of the B chain of an insulin analog in which the first amino acid of SEQ ID NO: 2 has been deleted. Similarly, amino acids added to the N-terminus of the native B chain are numbered starting with B0, followed by numbers of increasing negative value (e.g., B-1, B-2 . . . ) as amino acids are added to the N-terminus. Alternatively, any reference to an amino acid position in the linking moiety of a single chain analog, is made in reference to the native C chain of IGF 1 (SEQ ID NO: 23). For example, position 9 of the native C chain (or the “position C9”) has an alanine residue.

[0182] As used herein the term “native insulin peptide” is intended to designate the 51 amino acid heteroduplex comprising the A chain of SEQ ID NO: 1 and the B chain of SEQ ID NO: 2, as well as single-chain insulin analogs that comprise SEQ ID NOS: 1 and 2. The term “insulin peptide” as used herein, absent further descriptive language is intended to encompass the 51 amino acid heteroduplex comprising the A chain of SEQ ID NO: 1 and the B chain of SEQ ID NO: 2, as well as single-chain insulin analogs thereof (including for example those disclosed in published international application WO96/34882 and U.S. Pat. No. 6,630,348, the disclosures of which are incorporated herein by reference), including heteroduplexes and single-chain analogs that comprise modified analogs of the native A chain and/or B chain and derivatives thereof. Such modified analogs include modification of the amino acid at position A19, B16 or B25 to a 4-amino phenylalanine or one or more amino acid substitutions at positions selected from A5, A8, A9, A10, A12, A14, A15, A17, A18, A21, B1, B2, B3, B4, B5, B9, B10, B13, B14, B17, B20, B21, B22, B23, B26, B27, B28, B29 and B30 or deletions of any or all of positions B1-4 and B26-30. Insulin peptides as defined herein can also be analogs derived from a naturally occurring insulin by insertion or substitution of a non-peptide moiety, e.g. a retroinverso fragment, or incorporation of non-peptide bonds such as an azapeptide bond (CO substituted by NH) or pseudo-peptide bond (e.g. NH substituted with CH₂) or an ester bond (e.g., a depsipeptide, wherein one or more of the amide (—CONHR—) bonds are replaced by ester (COOR) bonds).

[0183] An “A19 insulin analog” is an insulin peptide that has a substitution of 4-amino phenylalanine or 4-methoxy phenylalanine for the native tyrosine residue at position 19 of the A chain of native insulin.

[0184] As used herein an “IGF^{B16B17} analog peptide” is a generic term that comprising an A chain and B chain heteroduplex, as well as single-chain insulin analogs thereof, wherein the A chain comprises the peptide sequence of SEQ ID NO: 19 and the B chain comprises the sequence of SEQ ID NO: 20 as well as analogs of those sequences wherein the analog of the A chain and/or B chain comprise 1-3 further amino acid substitutions, with the proviso that the B chain does not comprise the sequence of SEQ ID NO: 2 and comprises a tyrosine at position B16 and a leucine at position B17.

[0185] An “IGF YL analog” is a peptide comprising an IGF A chain of SEQ ID NO: 19 and an IGF B chain of SEQ ID NO: 69.

[0186] As used herein, the term “single-chain insulin analog” encompasses a group of structurally-related proteins wherein insulin or IGF A and B chains, or analogs or derivatives thereof, are covalently linked to one another to form a linear polypeptide chain. As disclosed herein the single-chain insulin analog comprises the covalent linkage of the carboxy terminus of the B chain to the amino terminus of the A chain via a linking moiety.

[0187] As used herein the term “insulin A chain”, absent further descriptive language is intended to encompass the 21 amino acid sequence of SEQ ID NO: 1 as well as functional analogs and derivatives thereof, including the A chain of A19 insulin analogs and other analogs known to those skilled in the art, including modification of the sequence of SEQ ID NO: 1 by one or more amino acid insertions, deletions or substitutions at positions selected from A4, A5, A8, A9, A10, A12, A14, A15, A17, A18, A21.

[0188] As used herein the term “insulin B chain”, absent further descriptive language is intended to encompass the 30 amino acid sequence of SEQ ID NO: 2, as well as modified functional analogs of the native B chain, including modification of the amino acid at position B16 or B25 to a 4-amino phenylalanine or one or more amino acid insertions, deletions or substitutions at positions selected from B1, B2, B3, B4, B5, B9, B10, B13, B14, B17, B20, B21, B22, B23, B25, B26, B27, B28, B29 and B30 or deletions of any or all of positions B1-4 and B26-30.

[0189] The term “identity” as used herein relates to the similarity between two or more sequences. Identity is measured by dividing the number of identical residues by the total number of residues and multiplying the product by 100 to achieve a percentage. Thus, two copies of exactly the same sequence have 100% identity, whereas two sequences that have amino acid deletions, additions, or substitutions relative to one another have a lower degree of identity. Those skilled in the art will recognize that several computer programs, such as those that employ algorithms such as BLAST (Basic Local Alignment Search Tool, Altschul et al. (1993) J. Mol. Biol. 215:403-410) are available for determining sequence identity.

[0190] The terms “glucagon related peptide” and “incretin peptide” are used interchangeably and said terms encompass peptides which have biological activity as agonists at any one or more of the glucagon, GLP-1, GLP-2, and GIP receptors and comprise an amino acid sequence that shares at least 40% sequence identity (e.g., 45%, 50%, 55%, 60%, 65%, 70%, 75%, 80%, 85%, 90%, 95%) with at least one of native glucagon, native oxyntomodulin, native exendin-4, native GLP-1, native GLP-2, or native GIP. Unless otherwise stated, any reference to an amino acid position in a glucagon related peptide (e.g. for linkage of a prodrug moiety, a conjugate moiety, a hydrophilic polymer, acylation or alkylation) refers to the position relative to the native glucagon amino acid sequence (SEQ ID NO: 701).

[0191] As used herein reference to the C-terminal region of a glucagon related peptide is intended to encompass the native C-terminus of a glucagon peptide or any amino acid of a C-terminal extension of a glucagon analog that has been extended by the addition of one or more amino acids at the C-terminus, or the terminal amino acid of a glucagon analog that has been shortened by the deletion of one or more amino acids, respectively, relative to the native glucagon sequence. An insulin peptide conjugated at the C-terminal region of a glucagon related peptide is intended to include linkage to the side chain of an amino acid of the C-terminal region or linkage through the C-terminal carboxylic acid moiety.

[0192] The term “GLP-1 agonist” refers to a compound that stimulates GLP-1 receptor activity, as measured by cAMP production using a validated in vitro model assay, such as that described in Example 13 of published International Application No. WO 2007/056362, published on May 18, 2007, the disclosure of which is hereby expressly incorporated by reference into the present application.

[0193] As used herein the term “native glucagon” refers to a peptide consisting of the sequence of SEQ ID NO: 701, the term “native GIP” refers to a peptide consisting of the sequence of SEQ ID NO: 707, and the term “native GLP-1” is a generic term that designates GLP-1(7-36) amide (consisting of the sequence of SEQ ID NO: 703), GLP-1(7-37) acid (consisting of the sequence of SEQ ID NO: 704) or a mixture of those two compounds. As used herein, a general reference to “glucagon” or “GIP” or “GLP-1” in the absence of any further designation is intended to mean native glucagon or native GIP or native GLP-1, respectively.

[0194] As used herein the term “glucagon peptide” is a generic term that designates the natural glucagon peptide of SEQ ID NO: 701 as well as modified derivatives having one or more amino acid modifications relative to the native glucagon sequence, optionally including but not limited to substitutions at amino acid positions 1, 2, 5, 7, 8, 10, 12, 13, 14, 16, 17, 18, 24, 28 and 29. Generally, all references to a particular amino acid position by number (e.g. position 28) refer to the amino acid at that position in native glucagon (SEQ ID NO: 701) or the corresponding amino acid position in any analogs thereof. For example, a reference to “position 28” would mean the corresponding position 27 for a glucagon analog in which the first amino acid of SEQ ID NO: 701 has been deleted. Similarly, a reference to “position 28” would mean the corresponding position 29 for a glucagon analog in which one amino acid has been added before the N-terminus of SEQ ID NO: 701.

[0195] As used herein the term “GLP-1 peptide” is a generic term that designates native GLP-1 as well as modified derivatives having one or more amino acid modifications relative to the native GLP-1 sequence.

[0196] As used herein the term “derivative” is intended to encompass chemical modification to a compound (e.g., an amino acid), including chemical modification in vitro, e.g. by introducing a group in a side chain in one or more positions of a polypeptide, e.g. a nitro group in a tyrosine residue, or iodine in a tyrosine residue, or by conversion of a free carboxylic group to an ester group or to an amide group, or by converting an amino group to an amide by acylation, or by acylating a hydroxy group rendering an ester, or by alkylation of a primary amine rendering a secondary amine or linkage of a hydrophilic moiety to an amino acid side chain. Other derivatives are obtained by oxidation or reduction of the side-chains of the amino acid residues in the polypeptide.

[0197] As used herein, the term “selectivity” of a molecule for a first receptor relative to a second receptor refers to the following ratio: EC₅₀ of the molecule at the second receptor divided by the EC₅₀ of the molecule at the first receptor. For example, a molecule that has an EC₅₀ of 1 nM at a first receptor and an EC₅₀ of 100 nM at a second receptor has 100-fold selectivity for the first receptor relative to the second receptor.

[0198] As used herein an amino acid “modification” refers to a substitution of an amino acid, or the derivation of an amino acid by the addition and/or removal of chemical groups to/from the amino acid, and includes substitution with any of the 20 amino acids commonly found in human proteins, as well as atypical or non-naturally occurring amino acids. Commercial sources of atypical amino acids include Sigma-Aldrich (Milwaukee, Wis.), ChemPep Inc. (Miami, Fla.), and Genzyme Pharmaceuticals (Cambridge, Mass.). Atypical amino acids may be purchased from commercial suppliers, synthesized de novo, or chemically modified or derivatized from naturally occurring amino acids.

[0199] As used herein an amino acid “substitution” refers to the replacement of one amino acid residue by a different amino acid residue.

[0200] As used herein, the term “conservative amino acid substitution” is defined herein as exchanges within one of the following five groups:

[0201] I. Small aliphatic, nonpolar or slightly polar residues:
[0202] Ala, Ser, Thr, Pro, Gly;

[0203] II. Polar, negatively charged residues and their amides:
[0204] Asp, Asn, Glu, Gln, cysteic acid and homocysteic acid;

[0205] III. Polar, positively charged residues:
[0206] His, Arg, Lys; Ornithine (Orn)

[0207] IV. Large, aliphatic, nonpolar residues:
[0208] Met, Leu, Ile, Val, Cys, Norleucine (Nle), homocysteine

[0209] V. Large, aromatic residues:
[0210] Phe, Tyr, Trp, acetyl phenylalanine

[0211] As used herein the general term “polyethylene glycol chain” or “PEG chain”, refers to mixtures of condensation polymers of ethylene oxide and water, in a branched or straight chain, represented by the general formula H(OCH₂CH₂)ₙOH, wherein n is at least 2. “Polyethylene glycol chain” or “PEG chain” is used in combination with a numeric suffix to indicate the approximate average molecular weight thereof. For example, PEG-5,000 refers to polyethylene glycol chain having a total molecular weight average of about 5,000 Daltons.

[0212] As used herein the term “pegylated” and like terms refers to a compound that has been modified from its native state by linking a polyethylene glycol chain to the compound. A “pegylated polypeptide” is a polypeptide that has a PEG chain covalently bound to the polypeptide.

[0213] As used herein a “linker” is a bond, molecule or group of molecules that binds two separate entities to one another. Linkers may provide for optimal spacing of the two entities or may further supply a labile linkage that allows the two entities to be separated from each other. Labile linkages include photocleavable groups, acid-labile moieties, base-labile moieties and enzyme-cleavable groups.

[0214] As used herein a “dimer” is a complex comprising two subunits covalently bound to one another via a linker. The term dimer, when used absent any qualifying language, encompasses both homodimers and heterodimers. A homodimer comprises two identical subunits, whereas a heterodimer comprises two subunits that differ, although the two subunits are substantially similar to one another.

[0215] The term “C₁-Cₙ alkyl” wherein n can be from 1 through 6, as used herein, represents a branched or linear alkyl group having from one to the specified number of carbon atoms. Typical C₁-C₆ alkyl groups include, but are not limited to, methyl, ethyl, n-propyl, iso-propyl, butyl, iso-Butyl, sec-butyl, tert-butyl, pentyl, hexyl and the like.

[0216] The terms “C₂-Cₙ alkenyl” wherein n can be from 2 through 6, as used herein, represents an olefinically unsaturated branched or linear group having from 2 to the specified number of carbon atoms and at least one double bond. Examples of such groups include, but are not limited to, 1-propenyl, 2-propenyl (—CH₂—CH═CH₂), 1,3-butadienyl, (—CH═CHCH═CH₂), 1-butenyl (—CH═CHCH₂CH₃), hexenyl, pentenyl, and the like.

[0217] The term “C₂-Cₙ alkynyl” wherein n can be from 2 to 6, refers to an unsaturated branched or linear group having from 2 to n carbon atoms and at least one triple bond. Examples of such groups include, but are not limited to, 1-propynyl, 2-propynyl, 1-butynyl, 2-butynyl, 1-pentynyl, and the like.

[0218] As used herein the term “aryl” refers to a mono- or bicyclic carbocyclic ring system having one or two aromatic rings including, but not limited to, phenyl, naphthyl, tetrahydronaphthyl, indanyl, indenyl, and the like. The size of the aryl ring and the presence of substituents or linking groups are indicated by designating the number of carbons present. For example, the term “(C₁-C₃ alkyl)(C₆-C₁₀ aryl)” refers to a 5 to 10 membered aryl that is attached to a parent moiety via a one to three membered alkyl chain.

[0219] The term “heteroaryl” as used herein refers to a mono- or bi-cyclic ring system containing one or two aromatic rings and containing at least one nitrogen, oxygen, or sulfur atom in an aromatic ring. The size of the heteroaryl ring and the presence of substituents or linking groups are indicated by designating the number of carbons present. For example, the term “(C₁-Cₙ alkyl)(C₅-C₆ heteroaryl)” refers to a 5 or 6 membered heteroaryl that is attached to a parent moiety via a one to “n” membered alkyl chain.

[0220] As used herein, the term “halo” refers to one or more members of the group consisting of fluorine, chlorine, bromine, and iodine.

[0221] As used herein the term “patient” without further designation is intended to encompass any warm blooded vertebrate domesticated animal (including for example, but not limited to livestock, horses, cats, dogs and other pets) and humans.

[0222] The term “isolated” as used herein means having been removed from its natural environment. In some embodiments, the analog is made through recombinant methods and the analog is isolated from the host cell.

[0223] The term “purified,” as used herein relates to the isolation of a molecule or compound in a form that is substantially free of contaminants normally associated with the molecule or compound in a native or natural environment and means having been increased in purity as a result of being separated from other components of the original composition. The term “purified polypeptide” is used herein to describe a polypeptide which has been separated from other compounds including, but not limited to nucleic acid molecules, lipids and carbohydrates.

[0224] A “peptidomimetic” refers to a chemical compound having a structure that is different from the general structure of an existing peptide, but that functions in a manner similar to the existing peptide, e.g., by mimicking the biological activity of that peptide. Peptidomimetics typically comprise naturally-occurring amino acids and/or unnatural amino acids, but can also comprise modifications to the peptide backbone. For example a peptidomimetic may include a sequence of naturally-occurring amino acids with the insertion or substitution of a non-peptide moiety, e.g. a retroinverso fragment, or incorporation of non-peptide bonds such as an azapeptide bond (CO substituted by NH) or pseudo-peptide bond (e.g. NH substituted with CH2), or an ester bond (e.g., depsipeptides, wherein one or more of the amide (—CONHR—) bonds are replaced by ester (COOR) bonds). Alternatively the peptidomimetic may be devoid of any naturally-occurring amino acids.

[0225] As used herein the term “charged amino acid” or “charged residue” refers to an amino acid that comprises a side chain that is negatively charged (i.e., de-protonated) or positively charged (i.e., protonated) in aqueous solution at physiological pH. For example, negatively charged amino acids include aspartic acid, glutamic acid, cysteic acid, homocysteic acid, and homoglutamic acid, whereas positively charged amino acids include arginine, lysine and histidine. Charged amino acids include the charged amino acids among the 20 amino acids commonly found in human proteins, as well as atypical or non-naturally occurring amino acids.

[0226] As used herein the term “acidic amino acid” refers to an amino acid that comprises a second acidic moiety (other than the alpha carboxylic acid of the amino acid), including for example, a side chain carboxylic acid or sulfonic acid group.

[0227] As used herein the term “patient” without further designation is intended to encompass any warm blooded vertebrate domesticated animal (including for example, but not limited to livestock, horses, cats, dogs and other pets), mammals, and humans.

### Abbreviations

[0228] Insulin analogs will be abbreviated as follows:

[0229] The insulin A and B chains will be designated by a capital A for the A chain and a capital B for the B chain. Modifications that deviate from the native insulin and IGF sequence are indicated in parenthesis following the designation of the A or B chain (e.g., [B¹(H5,H10,Y16,L17):A¹(H8,N18,N21)]) with the single letter amino acid abbreviation indicating the substitution and the number indicating the position of the substitution in the respective A or B chain, using native insulin numbering. A colon between the A and B chain indicates a two chain insulin whereas a dash will indicate a covalent bond and thus a single chain analog. In single chain analogs a linking moiety will be included between the A and B chains and the designation C1 refers to the native IGF 1 C peptide, SEQ ID NO: 23. The designation “position C8” in reference to the linking moiety designates an amino acid located at the position corresponding to the eighth amino acid of SEQ ID NO: 23.

### Embodiments

[0230] Disclosed herein are conjugates of an insulin peptide and a glucagon related peptide (an incretin) wherein the conjugate has activity in lowering blood glucose levels as well as inducing weight loss in a patient. Incretin-insulin conjugates (increlins) can be formed as peptide fusions where the carboxy terminus of the incretin is linked to the B chain of the insulin peptide. Such compounds have been found to exhibit activity at both the insulin and the respective incretin receptors. However, such conjugates have substantially reduced activity at the insulin receptor (see FIG. 1).

[0231] Applicants have found that usage of a non-peptide linear spacer to link an incretin to insulin produces a conjugate having full potency at the insulin receptor and at the increlin receptor. In particular, glucagon analogs have been previously described that exhibit co-agonist activity at the GLP-1 and glucagon receptors, or at the GLP-1 and GIP receptors, or tri-agonist activity at the glucagon, GLP-1 and GIP receptors. This coagonist and/or triagonist activity of the glucagon analog is retained, as well as insulin receptor activity, in the incretin-insulin conjugates disclosed herein. Advantageously, increlins disclosed herein have the ability to lower blood glucose and induce weight loss or prevent weight gain. In one embodiment the incretin-insulin conjugates of the present invention have at least 10 to 200, 50 to 150, or 70 to 100% the activity of native insulin at the insulin receptor, more particularly at the insulin subtype B receptor. In one embodiment the incretin-insulin conjugates of the present invention have at least 10 to 200, 50 to 150, or 70 to 100% the activity of native GLP-1 at the GLP-1 receptor, and/or at least 10 to 200, 50 to 150, or 70 to 100% the activity of native GIP at the GIP receptor. In one embodiment the incretin-insulin conjugates of the present invention have sub-nanomolar activity at both the GLP-1 and GIP receptors based on the in vitro assay of Example 9 and nanomolar activity at the insulin subtype B receptor based on the in vitro assay of Example 10.

[0232] In accordance with one embodiment the carboxy terminus of the incretin is linked via a spacer to 1) the side chain of an amino acid at position A14 or A15 of the A chain, 2) the amino N-terminus of the B chain, 3) to the side chain of an amino acid at position B1, B3, B10, B22, B28 or B29 of the B chain, or 4) at the side chain amino acid of any position of the linking moiety of a single chain insulin analog. In accordance with one embodiment the carboxy terminus of the incretin is linked via a spacer to the amino N-terminus of the B chain of the insulin peptide or to the side chain of the B28 or B29 amino acid. In accordance with one embodiment the carboxy terminus of the incretin is linked via a spacer to the N-terminal amine of the B chain of the insulin peptide.

[0233] In accordance with one embodiment an incretin-insulin conjugate is provided, comprising the general structure W-Y-Z, where W is an incretin, Z is an insulin peptide and Y is a spacer covalently linking W to Z. The incretin peptide can be any of the known incretins including for example native glucagon, GLP-1, or GIP, or an agonist analog of glucagon, GLP-1, or GIP, including a glucagon/GLP-1 co-agonist, a GIP/GLP-1 co-agonist, and a glucagon/GIP/GLP-1 tri-agonist. The insulin peptide can be any known insulin or insulin analog, including both two chain and single chain insulin analogs. The spacer linking the incretin and insulin peptides can be selected from any of the known linkers that are compatible with linking peptides to one another. In one embodiment the spacer comprises a moiety, selected from the group consisting of: amino, ether, thioether, maleimido, disulfide, selenoether, diselenium, amide, ester, thioester, alkene, cycloalkene, alkyne, trizoyl, carbamate, carbonate, cathepsin B-cleavable, oxime, and hydrazone, within the backbone of the linker chain.

[0234] In some embodiments, the spacer (Y) comprises a chain of atoms from 3 to 50, 3 to 25, 5 to 10 or 6 to 8 atoms in length. In some embodiments, the chain atoms in the backbone of the linker are selected from the group consisting of C, O, N, and S. Chain atoms and linkers may be selected according to their expected solubility (hydrophilicity) so as to provide a more soluble conjugate. In some embodiments, Y provides a functional group that is subject to cleavage by an enzyme or other catalyst or hydrolytic conditions found in the target tissue or organ or cell.

[0235] In some embodiments, Y is hydrolyzable in vivo. In these embodiments, Y comprises a functional group that is capable of undergoing hydrolysis in vivo. Nonlimiting examples of functional groups that are capable of undergoing hydrolysis in vivo include esters, anhydrides, and thioesters. In some embodiments, the spacer is metastable in vivo. In these embodiments, the spacer comprises a functional group that is capable of being chemically or enzymatically cleaved in vivo (e.g., an acid-labile, reduction-labile, or enzyme-labile functional group), optionally over a period of time. For example, Y can be selected to be stable in blood serum for at least 10, or 20, or 25, or 30, or 60, or 90, or 120 minutes, or 3, 4, 5, 6, 7, 8, 9, 10, 12, 15, 18 or 24 hours. In these embodiments, Y can comprise, for example, a hydrazone moiety, a disulfide moiety, or a cathepsin-cleavable moiety. When Y is metastable, and without intending to be bound by any particular theory, the W-Y-Z conjugate is stable in an extracellular environment, e.g., stable in blood serum for the time periods described above, but labile in the intracellular environment or conditions that mimic the intracellular environment, so that it cleaves upon entry into a cell. In some embodiments when Y is metastable, Y is stable in blood serum for at least about 24, 25, 26, 27, 28, 29, 30, 31, 32, 33, 34, 35, 36, 42, or 48 hours, or about 24-48, 48-72, 24-60, 36-48, 36-72, or 48-72 hours.

[0236] In accordance with one embodiment spacer Y is a linear chain of 6 to 8 atoms that comprises a disulfide, thioether, selenoeher, diselenium, thioether sulfoxide, oxime, hydrazone, triazole, alkyl, or alkene linkage within the backbone of the spacer linear chain. In accordance with one embodiment spacer Y is a linear chain of 6 to 8 atoms that comprises a disulfide, thioether, selenoether, diselenium, or oxime linkage within the backbone of the spacer linear chain. In accordance with one embodiment spacer Y is a linear chain of 6 to 8 atoms that comprises a disulfide, thioether, selenoether or diselenium linkage within the backbone of the spacer linear chain. In accordance with one embodiment the spacer has the general structure:

[chemical structure]

wherein R₁, R₂, R₃ and R₄ are independently selected from the group consisting of H, and C₁-C₃ alkyl;

[0237] Y is C, S, Se or S═O,

[0238] Z is C, S, Se, —S(C₁-C₃)(C₅-C₆ aryl)-, or Z in combination with Y is —C═C—, —O—N═, —N—N═, or a 1,2,3 triazole

[0239] n is 0 or 1; and

[0240] m is 1, 2 or 3, wherein when Y is S═O, Z is C. In one embodiment the spacer has the general structure of formula I wherein Y is C, S, or Se and Z is C, S, or Se, or Z in combination with Y is —O—N═ or a 1,2,3 triazole, with the proviso that Y and Z are not both C. In one embodiment the spacer has the general structure of formula I wherein Y is C, S═O, or Se and Z is C, or Z in combination with Y is —O—N═ or a 1, 2, 3 triazole. In one embodiment the spacer has the general structure of formula I wherein Y is S or Se and Z is C, S, or Se, or Z in combination with Y is —O—N═ or a 1, 2, 3 triazole. In one embodiment the spacer has the general structure of formula I wherein Z in combination with Y is —O—N═ or a 1, 2, 3 triazole. In one embodiment the spacer has the general structure of formula I wherein Z in combination with Y forms an oxime or a hydrazone. In one embodiment the spacer has the general structure of formula I wherein R₁, R₂, R₃ and R₄ are independently selected from the group consisting of H and CH; Y is C, S, or Se, Z is Se or S; n is 0 or 1; and m is 1, 2 or 3. In one embodiment the spacer has the general structure of formula I wherein R₁, R₂, R₃ and R₄ are independently selected from the group consisting of H and CH; Y and Z are independently selected from S and Se; n is 0 or 1; and m is 1, 2 or 3.

[0241] In accordance with one embodiment the spacer has the general structure of Formula I wherein R₁, R₂, R₃ and R₄ are independently selected from the group consisting of H, and C₁-C₂ alkyl, Y is S or S═O, Z is C or S, n is 0 or 1; and m is 1, 2 or 3, with the proviso that when Y is S═O, Z is C. In accordance with one embodiment the spacer has the general structure of Formula I wherein R₁, R₂, R₃ and R₄ are independently selected from the group consisting of H, and CH₃, Y is S, Z is C or S, n is 0 or 1; and m is 1, 2 or 3. In one embodiment the spacer comprises the general structure of Formula II:

[chemical structure]

wherein R₁, R₂, R₃ and R₄ are independently selected from the group consisting of H, and C₁-C₂ alkyl, n is 0 or 1, and m is 1, 2 or 3. In one embodiment the (CH₂)ₙCR₁R₂S portion of the spacer represents the side chain of a C-terminal amino acid of the incretin, and in one embodiment (where n is 0 and R₁ and R₂ are each H) the C-terminal amino acid is cysteine. Furthermore, in one embodiment the —SCR₁R₂(CH₂)ₘ portion of the spacer represents a thiol derivation of the N-terminus, or amino acid side chain, of the insulin B chain. Formation of the disulfide bond links the derivatized insulin to the incretin to form an increlin.

[0242] In one embodiment the spacer comprises the general structure of Formula II wherein R₁, R₂, R₃ and R₄ are independently selected from the group consisting of H, and CH₃, n is 0 or 1, and m is 1, 2 or 3. In one embodiment the spacer comprises the general structure of Formula II wherein R₁, R₂, R₃ and R₄ are independently selected from the group consisting of H, and CH₃, n is 0, and m is 1, 2 or 3. In one embodiment the spacer comprises the general structure of Formula II wherein R₂, and R₃ are both H, R₁ and R₄ are independently selected from the group consisting of H, and CH₃, n is 0 or 1, and m is 1, 2 or 3. In one embodiment the spacer comprises the general structure of Formula II wherein R₂, R₃ and R₄ are each H, R₁ is H or CH₃, n is 0 or 1, and m is 1 or 2. In one embodiment the spacer comprises the general structure of Formula II wherein R₃ and R₄ are each H, R₁ and R₂ are independently H or CH₃, n is 0, and m is 2. In one embodiment the spacer comprises the general structure of Formula II wherein R₂, R₃ and R₄ are each H, R₁ is H or CH₃, n is 0, and m is 2. In one embodiment R₁, R₂, R₃ and R₄ are each H, n is 0, and m is 1, 2 or 3.

[0243] In one embodiment the spacer comprises the general structure of Formula III:

[chemical structure]

wherein R₁ is H or CH₃, Y is S, Se or S═O, Z is C, Se or S, wherein when Y is S═O, Z is C. In one embodiment the spacer comprises the general structure of Formula III, wherein R₁ is H or CH₃, Y is S and Z is S. In one embodiment the incretin-insulin conjugate comprises the structure:

[chemical structure]

wherein R₃ is H or CH₃.

[0244] In one embodiment the incretin-insulin conjugate comprises a covalent linkage of the carboxy terminus of an incretin peptide to the amino or carboxy terminus of the insulin A chain or B chain via a spacer of the general Formula of I, II, III or IV. In another embodiment the N-terminus or C-terminus of an insulin peptide is covalently linked to the side chain of an amino acid of a incretin peptide at a position selected from 10, 20, 24, 28 and 29, optionally at position B29, via a spacer of Formula I, II, III or IV.

[0245] In another embodiment one or two incretin peptides are covalently linked to the insulin peptide through a position independently selected from the N-terminal alpha amine of the B chain, the carboxy terminus of the B chain or at any position of the linking moiety that links the A chain and B chain of a single chain insulin analog, including for example at position C8. In one embodiment the carboxy terminal region of the incretin peptide is covalently linked to the N-terminal alpha amine of the B chain of an insulin peptide. In one embodiment the carboxy terminus of the incretin peptide is covalently linked to the N-terminal alpha amine of the B chain of a two chain or single chain insulin peptide analog.

[0246] In accordance with one embodiment the insulin peptide is a two chain insulin, wherein the A chain and B chain are linked to one another via disulfide bonds. In one embodiment the conjugate comprises a two chain insulin peptide wherein the carboxy terminal region of the incretin peptide is covalently linked to the amino terminus of the A chain of the insulin peptide. In one embodiment the conjugate comprises a two chain insulin peptide wherein the carboxy terminus of the A chain or the B chain of the insulin peptide is covalently linked to the amino terminus of the incretin peptide. In one embodiment the conjugate comprises a two chain insulin peptide wherein the carboxy terminus of the incretin peptide is covalently linked to the N-terminal amine of the B chain of the insulin peptide. In one embodiment the conjugate comprises a two chain insulin peptide wherein the carboxy terminus of the B chain of the insulin peptide is covalently linked to the amino terminus of the incretin peptide. In each of these embodiments the linkage between the incretin peptide and the insulin peptide is via a spacer of the general Formula I, II, III or IV, wherein when linker IV is used the incretin peptide comprises a C-terminal cysteine.

[0247] In another embodiment the conjugate comprises a two chain insulin analog and a first and second incretin peptide wherein each incretin peptide is independently covalently linked to the insulin peptide at a position selected from the group consisting of the amino terminus of the B chain, the carboxy terminus of the A chain, and the carboxy terminus of the B chain. In one embodiment the conjugate comprises a two chain insulin peptide wherein the carboxy terminal region of a first incretin peptide is covalently linked to the amino terminus of the B chain of the insulin peptide and the carboxy terminus of the B chain of the insulin peptide is covalently linked to the amino terminus of a second incretin peptide. In one embodiment the first and second incretin peptides are different and have activity at two different receptors selected from the group consisting of the glucagon, GLP-1 and GIP receptors. In one embodiment the first incretin peptide has activity at the glucagon receptor and the second incretin peptide has activity at the GLP-1 receptor. In one embodiment the first and/or second incretin peptide is a coagonist having activity at two receptors selected from the group consisting of the glucagon, GLP-1 and GIP receptors. In each of these embodiments the linkage between the incretin peptide and the insulin peptide is via a spacer of the general Formula I, II, III or IV.

[0248] In some or any embodiments, the insulin peptide of the presently disclosed conjugate is native insulin, comprising the A chain of SEQ ID NO: 1 and the B chain of SEQ ID NO: 2, or an analog of native insulin, including for example a single-chain insulin analog comprising SEQ ID NOS: 1 and 2. In one embodiment the insulin peptide is an IGF^{B16B17} analog peptide. In accordance with the present disclosure analogs of insulin encompass polypeptides comprising an A chain and a B chain wherein the insulin analogs differ from native insulin by one, two or three, or more amino acid substitutions at positions selected from A5, A8, A9, A10, A12, A14, A15, A17, A18, A21, B1, B2, B3, B4, B5, B9, B10, B13, B14, B17, B20, B21, B22, B23, B26, B27, B28, B29 and B30 or deletions of any or all of positions B1-4 and B26-30.

[0249] In one embodiment the incretin peptide component of the conjugate is a peptide selected from the group consisting of native glucagon (SEQ ID NO: 701), native GLP-1 (SEQ ID NO: 703) and native GIP (SEQ ID NO: 707). In one embodiment the incretin peptide comprises a C-terminal extension comprising the sequence GPSSGAPPPS (SEQ ID NO: 820), KRNRNNIA (SEQ ID NO: 821) or KRNR (SEQ ID NO: 822) linked to the carboxy terminal amino acid of the incretin peptide. In one embodiment the C-terminal extension is GPSSGAPPPS (SEQ ID NO: 820). In a further embodiment the incretin peptide comprises an aminoisobutyric acid at position 2, a C-terminal extension of GPSSGAPPPS (SEQ ID NO: 820) and an optional alkylation or acylation at position 10 and/or 40 with a C₁₀ to C₂₀ alkyl or acyl group, and further optionally pegylation at the side chain of an amino acid added (e.g., at position 40, relative to the native glucagon sequence) to the C-terminus of the incretin peptide. In one embodiment the incretin peptide is pegylated at the side chain of the amino acids at both positions 24 and 40. In one embodiment the incretin peptide is a glucagon peptide or GLP-1 peptide. In one embodiment the incretin peptide is a peptide selected from the group consisting of Y(aib)EGTFTSDYSIYLDKQAA(aib)EFVNWLLAGGPSSGAPPPS-amide (SEQ ID NO: 756), H(aib)QGTFTSDYSKYLDERAAQDFVQWLLDGGPSSGAPPPS-amide (SEQ ID NO: 1931), H(aib)EGTFTSDVSSYLEEQAAKEFIAWLVKGGPSSGAPPPS-amide (SEQ ID NO: 1932), HSQGTFTSDYSKYLDSRRAQDFVQWLMNTGPSSGAPPPS-amide (SEQ ID NO: 1933), and YaibEGTFISDYSIYLDRQAA(aib)EFVNWLLAGGPSSGAPPPS-amide (SEQ ID NO: 1934), or a peptide that differs from SEQ ID NO: 756, 1931, 1932, 1933 or 1934 by 1, 2 or three amino acid substitutions or additions, including for example a substitutions at position 10, optionally with lysine, and/or the addition of an amino acid at position 40, optionally lysine. In a further embodiment the lysine at position 10 and/or 40 is acylated and/or the added amino acid at position 40 is pegylated. In one embodiment the incretin peptide is a peptide selected from the group consisting of Y(aib)EGTFTSDYSIYLDKQAA(aib)EFVNWLLAGGPSSGAPPPS-amide (SEQ ID NO: 756), H(aib)QGTFTSDYSKYLDERAAQDFVQWLLDGGPSSGAPPPS-amide (SEQ ID NO: 1931), and H(aib)EGTFTSDVSSYLEEQAAKEFIAWLVKGGPSSGAPPPS-amide (SEQ ID NO: 1932). In one embodiment the incretin peptide is Y(aib)EGTFTSDYSIYLDKQAA(aib)EFVNWLLAGGPSSGAPPPS-amide (SEQ ID NO: 756), or H(aib)QGTFTSDYSKYLDERAAQDFVQWLLDGGPSSGAPPPS-amide (SEQ ID NO: 1931). In one embodiment the incretin peptide is Y(aib)EGTFTSDYSIYLDKQAA(aib)EFVNWLLAGGPSSGAPPPS-amide (SEQ ID NO: 756), or a peptide that differs from SEQ ID NO: 756 by 1, 2 or three amino acid substitutions or additions, including for example a substitutions at position 10, optionally with lysine, and/or the addition of an amino acid at position 40. In a further embodiment the lysine at position 10 is acylated and/or the added amino acid at position 40 is pegylated. In one embodiment the incretin peptide is H(aib)QGTFTSDYSKYLDERAA Q DFVQWLLDGGPSSGAPPPS-amide (SEQ ID NO: 1931), or a peptide that differs from SEQ ID NO: 1931 by 1, 2 or three amino acid substitutions or additions, including for example substitutions at position 10, optionally with lysine, and/or the addition of an amino acid at position 40. In a further embodiment the lysine at position 10 is acylated and/or the added amino acid at position 40 is pegylated.

[0250] In some embodiments, the incretin peptide of the conjugate of the present disclosures is an analog of native human glucagon (SEQ ID NO: 701) comprising an amino acid sequence based on the amino acid sequence of SEQ ID NO: 701 but differing from SEQ ID NO: 701 by one or more (e.g., 1, 2, 3, 4, 5, 6, 7, 8, 9, 10, 11, 12, 13, 14, 15, and in some instances, 16 or more (e.g., 17, 18, 19, 20, 21, 22, 23, 24, 25, etc.), specified or optional amino acid modifications. In some or any embodiments, the peptide of the present disclosures comprises a total of 1, up to 2, up to 3, up to 4, up to 5, up to 6, up to 7, up to 8, up to 9, or up to 10 additional amino acid modifications (e.g., in addition to the specified amino acid modifications), relative to the native human glucagon sequence (SEQ ID NO: 701). For example, in one embodiment an analog of glucagon (SEQ ID NO: 701) comprises (a) an amino acid comprising an imidazole side chain at position 1, (b) an DPP-IV protective amino acid at position 2, (c) an acylated amino acid or alkylated amino acid at any of positions 9, 10, 12, 16, 20, or 37-43, (d) an alpha helix stabilizing amino acid at one or more of positions 16, 17, 18, 19, 20, and 21, and (e) up to ten additional amino acid modifications relative to SEQ ID NO: 701. In one embodiment the present disclosure provides an analog of glucagon comprising (a)-(d) with up to 10 additional amino acid modifications in addition to the amino acid modifications specified in (a)-(d). In some or any embodiments, the modifications are any of those described herein, e.g., acylation, alkylation, pegylation, truncation at C-terminus, substitution of the amino acid at one or more of positions 1, 2, 3, 7, 10, 12, 15, 16, 17, 18, 19, 20, 21, 23, 24, 27, 28, and 29.

[0251] In accordance with one embodiment an insulin agonist/incretin conjugate is provided comprising an incretin peptide and an insulin peptide, wherein the incretin peptide is linked to the insulin peptide via a linear chain spacer of 5 to 10 atoms, wherein the spacer comprises a disulfide, thioether, thioether sulfoxide, alkyl, alkene linkage within the backbone of the spacer linear chain. In one embodiment the C-terminal region of the incretin peptide is covalently linked to the insulin peptide through a position independently selected from the side chain of an amino acid at position B3, B28 or B29 of the B chain and the N-terminal alpha amine of the B chain. In one embodiment the insulin peptide of the conjugate comprises an A chain sequence of GIVEQCCX₈SICSLYQLENYCX₂₁ (SEQ ID NO: 3), or an analog thereof having 1 or 2 amino acid substitutions at a position selected from A5, A9, A10, A12, A14, A15, A17, A18, and a B chain sequence of R₂₂-HLCGSHLVEALYLVCGERGFX₄₅ (SEQ ID NO: 15), or an analog thereof having 1 or 2 amino acid substitutions at a position selected from B5, B9, B10, B13, B14, B17, B20, B21, B22 and B23 (positions relative to the native insulin) wherein the B chain is linked to the A chain through disulfide linkages; and

[0252] R₂₂ is an amine, or a 1 to 4 amino acid sequence selected from the group consisting of a FVNQ (SEQ ID NO: 12), FVKQ (SEQ ID NO: 8), VNQ, NQ and Q;

[0253] X₈ is selected from the group consisting of threonine and histidine;

[0254] X₂₁ is selected from the group consisting of asparagine, lysine, glycine, alanine; and

[0255] X₄₅ is histidine, tyrosine or phenylalanine. In one embodiment the insulin is linked to the incretin via a spacer of the general Formula I (as defined herein), wherein the incretin peptide comprises the sequence X₈₀X₈₁X₈₂GTFTSDX₉₅SX₈₃YLX₈₄X₈₅X₈₆X₈₇AX₈₈X₈₉FX₉₀X₉₁WLX₉₂X₉₃X₉₄-Z (SEQ ID NO: 1928), wherein X₈₀ is His, Tyr, D-histidine, desaminohistidine, hydroxyl-histidine, acetyl-histidine, homo-histidine or alpha, alpha-dimethyl imidiazole acetic acid (DMIA) N-methyl histidine, alpha-methyl histidine, or imidazole acetic acid; X₈₁ is Ser, D-serine, Ala, Val, glycine, N-methyl serine, aminoisobutyric acid (AIB), N-methyl alanine or D-alanine; X₈₂ is Gln or Glu; X₈₃ is Lys or Ile; X₈₄ is Asp or Glu; X₈₅ is Lys, Arg, Ser or Glu; X₈₆ is Arg or Gln; X₈₇ is Ala or Arg; X₈₈ is Aib, Gln or Lys; X₈₉ is Asp or Glu; X₉₀ is Val or Ile; X₉₁ is Asn, Gln or Ala; X₉₂ is Leu, Val or Met; X₉₃ is Asp, Lys Asn or Ala; X₉₄ is Gly or Thr; and Z is selected from the group consisting of —COOH, —CONH₂ and GPSSGAPPPS-CONH₂ (SEQ ID NO: 823) and X₉₅ is Tyr. In one embodiment X₈₀ is His or Tyr and X₈₆ is aib.

[0256] In one embodiment an incretin-insulin conjugate is provided wherein the C-terminal amino acid of the incretin peptides is covalently linked to the insulin peptide via a linear chain spacer at a position independently selected from the side chain of an amino acid at position B3, B28 or B29 of the B chain, and the N-terminal alpha amine of the B chain. In one embodiment the C-terminal amino acid of the incretin peptides is covalently linked to the insulin peptide via a linear chain spacer at the N-terminal alpha amine of the B chain. In accordance with one embodiment the insulin peptide comprises

[0257] an A chain sequence of GIVEQCCTSICSLYQLENYCN-R₁₃ (SEQ ID NO: 1) and a B chain sequence of FVNQHLCGSHLVEALYLVCGERGFFYTPKT (SEQ ID NO: 2), or an A chain and/or B chain that differs from SEQ ID NO: 1 and/or SEQ ID NO: 2 by 1, 2, or three amino acid substitutions, wherein the B chain is linked to the A chain through disulfide linkages;

[0258] a linear chain spacer comprising the general structure of Formula II:

[chemical structure]

wherein R₁, R₂, R₃ and R₄ are independently selected from the group consisting of H and CH₃, n is 0 or 1, m is 1, 2 or 3, Y is S, Se or C and Z is S or Se; or a linker of Formula IV:

[chemical structure]

wherein R₃ is H or CH₃; and

[0259] the incretin peptide comprises the sequence X₈₀X₈₁X₈₂GTFTSDX₇₉SX₈₃YLX₈₄X₈₅X₈₆X₈₇AX₈₈X₈₉FX₉₀X₉₁WLX₉₂X₉₃X₉₄-Z₁ (SEQ ID NO: 1928), wherein
[0260] X₇₉ is an amino acid covalently attached to a C12 to C18 acyl or alkyl group;
[0261] X₈₀ is His, Tyr, D-histidine, desaminohistidine, hydroxyl-histidine, acetyl-histidine, homo-histidine or alpha, alpha-dimethyl imidiazole acetic acid (DMIA) N-methyl histidine, alpha-methyl histidine, or imidazole acetic acid;
[0262] X₈₁ is Ser, D-serine, Ala, Val, glycine, N-methyl serine or aminoisobutyric acid (AIB), N-methyl alanine and D-alanine;
[0263] X₈₂ is Gln or Glu;
[0264] X₈₃ is Lys or Ile;
[0265] X₈₄ is Asp or Glu;
[0266] X₈₅ is Lys, Arg, Ser or Glu;
[0267] X₈₆ is Arg or Gln;
[0268] X₈₇ is Ala or Arg;
[0269] X₈₈ is aminoisobutyric acid, Gln or Lys;
[0270] X₈₉ is Asp or Glu;
[0271] X₉₀ is Val or Ile;
[0272] X₉₁ is Asn, Gln or Ala;
[0273] X₉₂ is Leu, Val or Met;
[0274] X₉₃ is Asp, Lys Asn or Ala;
[0275] X₉₄ is Gly or Thr;
[0276] X₉₅ is a bond or Gly, and Z₁ is selected from the group consisting of —COOH, GPSSGAPPPS (SEQ ID NO: 820), KRNRNNIA (SEQ ID NO: 821), and KRNR (SEQ ID NO: 822). In one embodiment the incretin peptide comprises the sequence X₈₀X₈₁X₈₂GTFTSDX₇₉SX₈₃YLX₈₄X₈₅X₈₆X₈₇AX₈₈X₈₉FX₉₀X₉₁WLX₉₂X₉₃X₉₄-Z₁ (SEQ ID NO: 1928), wherein
[0277] X₇₉ is an amino acid covalently attached to a C12 to C18 acyl or alkyl group, optionally lysine or; X₈₀ is His or Tyr, D-histidine, desaminohistidine, hydroxyl-histidine, acetyl-histidine, homo-histidine or alpha, alpha-dimethyl imidiazole acetic acid (DMIA) N-methyl histidine, alpha-methyl histidine, or imidazole acetic acid; X₈₁ is D-serine or aminoisobutyric acid (AIB); X₈₂ is Gln or Glu; X₈₃ is Lys or Ile; X₈₄ is Asp or Glu; X₈₅ is Lys, Arg, Ser or Glu; X₈₆ is Arg or Gln; X₈₇ is Ala or Arg; X₈₈ is aminoisobutyric acid, Gln or Lys; X₈₉ is Asp or Glu; X₉₀ is Val or Ile; X₉₁ is Asn, Gln or Ala; X₉₂ is Leu, Val or Met; X₉₃ is Ala, Asp, Lys Asn or Ala; X₉₄ is Gly or Thr; and Z₁ is selected from the group consisting of —COOH, GPSSGAPPPS (SEQ ID NO: 820), KRNRNNIA (SEQ ID NO: 821), and KRNR (SEQ ID NO: 822). In one embodiment Z₁ is SEQ ID NO: 820 (GPSSGAPPPS).

[0278] In accordance with one embodiment the insulin peptide comprises

[0279] an A chain sequence of GIVEQCCTSICSLYQLENYCN-R₁₃ (SEQ ID NO: 1) and a B chain sequence of FVNQHLCGSHLVEALYLVCGERGFFYTPKT (SEQ ID NO: 2), or an A chain and/or B chain that differs from SEQ ID NO: 1 and/or SEQ ID NO: 2 by 1, 2, or three amino acid substitutions, wherein the B chain is linked to the A chain through disulfide linkages;

[0280] a linear chain spacer comprising the general structure of Formula II:

[chemical structure]

wherein R₁, R₂, R₃ and R₄ are independently selected from the group consisting of H and CH₃, n is 0 or 1, m is 1, 2 or 3, Y is S, Se or C and Z is S or Se; or a linker of Formula IV:

[chemical structure]

wherein R₃ is H or CH₃; and

[0281] the incretin peptide comprises the sequence X₈₀X₈₁X₈₂GTFTSDX₇₉SKYLX₈₄X₈₅X₈₆AAX₈₈X₈₉FVQWLX₉₀X₉₁X₉₂X₉₃X₉₄GPSSGAPPPS (SEQ ID NO: 1929)

wherein:
[0282] X₇₉ is an amino acid covalently attached to a C12 to C18 acyl or alkyl group;
[0283] X₈₀ is Tyr, His, D-histidine, desaminohistidine, hydroxyl-histidine, acetyl-histidine, homo-histidine or alpha, alpha-dimethyl imidiazole acetic acid (DMIA), N-methyl histidine, alpha-methyl histidine, or imidazole acetic acid;
[0284] X₈₁ is a DPP-IV protective amino acid, optionally, an alpha, alpha-disubstituted amino acid (e.g., AIB);
[0285] X₈₂ is selected from the group consisting of Glu, Ala, Leu, Ile, Nle, Val, NorVal, homoserine, Met, methionine sulfoxide, methionine sulfone, acetyl-Orn, acetyl-diaminobutanoic acid, and acetyl-Lys;
[0286] X₈₄ is an acidic amino acid, optionally, Glu or Asp;
[0287] X₈₅ is Glu, Ala, alpha, alpha-disubstituted amino acid (e.g., AIB), His, Lys)
[0288] X₈₆ is Arg, His, or Gln;
[0289] X₈₈ is a selected from group consisting of: alpha, alpha-disubstituted amino acid (e.g., AIB) or Gln or His, Lys, or Ala;
[0290] X₈₉ is an acidic amino acid, optionally, Asp or Glu;
[0291] X₉₀ is Leu, Ala, or Nle;
[0292] X₉₁ is Ala, Lys, or an acidic amino acid (optionally, Asp or Glu);
[0293] X₉₂ is aliphatic, e.g., Ala or Gly or AIB or Val;
[0294] X₉₃ is small aliphatic amino acid, e.g., Ala or Gly
[0295] X₉₄ is Ala or a basic amino acid (optionally, Arg or Lys).

[0296] In a further embodiment the incretin peptide is a peptide selected from the group consisting of Y(aib)EGTFTSDYSIYLDKQAA(aib)EFVNWLLAGGPSSGAPPPS-amide (SEQ ID NO: 756), H(aib)QGTFTSDYSKYLDERAAQDFVQWLLDGGPSSGAPPPS-amide (SEQ ID NO: 1931), H(aib)EGTFTSDVSSYLEEQAAKEFIAWLVKGGPSSGAPPPS-amide (SEQ ID NO: 1932), HSQGTFTSDYSKYLDSRRA Q DFVQWLMNTGPSSGAPPPS-amide (SEQ ID NO: 1933), and YaibEGTFISDYSIYLDRQAAaibEFVNWLLAGGPSSGAPPPS-amide (SEQ ID NO: 1934), or optionally a modification of the immediately above sequences, modified to comprise an amino acid covalently attached to a C12 to C18 acyl or alkyl group at position 10 or 40; and the spacer joining the incretin to the insulin peptide comprises the general structure of Formula II:

[chemical structure]

wherein R₁, R₂, R₃ and R₄ are independently selected from the group consisting of H, and C₁-C₂ alkyl, n is 0 or 1, and m is 1, 2 or 3. In one embodiment the spacer comprises the general structure of Formula II wherein R₁, R₂, R₃ and R₄ are independently selected from the group consisting of H, and CH₃, n is 1, and m is 2. In one embodiment the linker comprises the structure of Formula IV:

[chemical structure]

wherein R₃ is H or CH₃ and optionally R₃ is H. In one embodiment the linker consists of the structure of

[chemical structure]

[0297] In one embodiment the insulin peptide of the insulin agonist/incretin conjugate comprises an A chain sequence of GIVEQCCTSICSLYQLENYCN-R₁₃ (SEQ ID NO: 1) and a B chain sequence selected from the group consisting of FVNQHLCGSHLVEALYLVCGERGFFYTPKT (SEQ ID NO: 2) FVNQHLCGSHLVEALYLVCGERGFFYTKPT (SEQ ID NO: 9) FVNQHLCGSHLVEALYLVCGERGFFYTDKT (SEQ ID NO: 5) FVKQHLCGSHLVEALYLVCGERGFFYTEKT (SEQ ID NO: 6).

[0298] In a further embodiment an insulin agonist/incretin conjugate is provided comprising the general structure X—Y—Z wherein X is an incretin peptide having the sequence X₁X₂EGTFTSDX₁₀SIYLDKQAAX₂₀EFVNWLLAGGPSSGAPPPS (SEQ ID NO: 2037), X₁X₂EGTFTSDVSIYLDKQAAX₂₀EFVNWLLAGGPSSGAPPPSX₄₀ (SEQ ID NO: 2038), Y(aib)EGTFTSDYSIYLDKQAA(aib)EFVNWLLAGGPSSGAPPPS-amide (SEQ ID NO: 756), or H(aib)QGTFTSDYSKYLDERAAQDFVQWLLDGGPSSGAPPPS-amide (SEQ ID NO: 1931), wherein X₁ is His or Tyr; X₂ is aminoisobutyric acid; X₁₀ is Lys acylated with a C16 to C20 alkyl group optionally via a gamma Glu linker; X₂₀ is aminoisobutyric acid; and X₄₀ is Lys acylated with a C16 to C20 alkyl group optionally via a gamma Glu linker; X is the spacer joining the incretin to the insulin peptide, and comprising the general structure of Formula II:

[chemical structure]

wherein R₁, R₂, R₃ and R₄ are independently selected from the group consisting of H, and CH₃, n is 0 or 1, and m is 1, 2 or 3; or the spacer comprises the general structure of Formula IV:

[chemical structure]

wherein R₃ is H or CH₃, and optionally R₃ is H; and Z is an insulin peptide comprising an A chain sequence of GIVEQCCTSICSLYQLENYCN-R₁₃ (SEQ ID NO: 1) and a B chain sequence selected from the group consisting of FVNQHLCGSHLVEALYLVCGERGFFYTPKT (SEQ ID NO: 2) FVNQHLCGSHLVEALYLVCGERGFFYTKPT (SEQ ID NO: 9) FVNQHLCGSHLVEALYLVCGERGFFYTDKT (SEQ ID NO: 5) FVKQHLCGSHLVEALYLVCGERGFFYTEKT (SEQ ID NO: 6).

[0299] In accordance with one embodiment the incretin-insulin conjugate is lipidated (e.g. the addition of a non-native acyl or alkyl group) or pegylated (addition of polyethylene glycol chain) at the side chain of an amino acid of said conjugate. In one embodiment the lipidation occurs at a position selected from positions 10, 16, 20, 30 or 40 of the incretin peptide (wherein positions 30 and 40 represent C-terminal extensions added to the incretin peptide relative to the native glucagon sequence) and/or at positions B28 or B29 of the insulin peptide. In one embodiment two sites selected from positions 10, 16, 20, 30 or 40 of the incretin peptide and positions B28 or B29 of the insulin peptide are lipidated. In one embodiment one or two sites selected from positions 10, 16, 20, 30 or 40 of the incretin peptide are lipidated. In one embodiment one or two sites selected from positions 10 and 40 of the incretin peptide are lipidated, optionally with an acyl group at one or two of those positions. In one embodiment the incretin peptide is acylated at position 10 with a C14-C18 acyl group. In one embodiment the incretin peptide comprises a non-native acyl or alkyl group of C14 to C30 or C14 to C20, or C16 to C20, covalently linked to a side chain at position 10 or 40 of the incretin peptide (based on the numbering of native glucagon). In one embodiment a C12, C, 13, C14, C15, C16, C17, C18, C19 or a C20 acyl or alkyl group is linked to the side chain of an amino acid at position 10 or 40, optionally through a linker such as gamma glutamic acid.

[0300] In one embodiment the incretin-insulin conjugate is pegylated at a position selected from positions 24, 30 or 40 of the incretin peptide (wherein positions 30 and 40 represent C-terminal extensions added to the incretin peptide relative to the native glucagon sequence) and/or at positions B28 or B29 of the insulin peptide. In one embodiment two sites selected from positions 24, 30 or 40 of the incretin peptide and positions B28 or B29 of the insulin peptide are pegylated. In one embodiment two sites selected from positions 24, 30 or 40 of the incretin peptide are pegylated. In one embodiment the incretin-insulin conjugate is pegylated at positions 24 and 40 of the incretin peptide. In one embodiment the incretin-insulin conjugate is pegylated only at position 40 of the incretin peptide.

[0301] In one embodiment the incretin-insulin conjugate comprises both lipidation and pegylation, wherein the incretin-insulin conjugate is lipidated at a position selected from 10, 16, 20, 30 or 40 of the incretin peptide or position B28 or B29 of the insulin peptide and pegylated at a position selected from 24, 30 or 40 of the incretin peptide or position B28 or B29 of the insulin peptide, provided that pegylation and lipidation occur at different positions. In one embodiment the incretin-insulin conjugate comprises both lipidation and pegylation, wherein the incretin-insulin conjugate is lipidated at position 10 and is pegylated at position 40.

[0302] In one embodiment an incretin-insulin conjugate is provided comprising an incretin peptide selected from the group consisting of X₁X₂EGTFTSDX₁₀SIYLDKQAAX₂₀EFVNWLLAGGPSSGAPPPS (SEQ ID NO: 2037) and X₁X₂EGTFTSDVSIYLDKQAAX₂₀EFVNWLLAGGPSSGAPPPSX₄₀ (SEQ ID NO: 2038), wherein

[0303] X₁ is His or Tyr;

[0304] X₂ is aminoisobutyric acid;

[0305] X₁₀ is Lys acylated with a C16 to C20 alkyl group optionally via a gamma Glu linker;

[0306] X₂₀ is aminoisobutyric acid; and

[0307] X₄₀ is Lys acylated with a C16 to C20 alkyl group optionally via a gamma Glu linker; an insulin peptide comprising
[0308] an A chain sequence of GIVEQCCX₈SICSLYQLENYCX₂₁ (SEQ ID NO: 3); and
[0309] a B chain sequence of R₂₂-HLCGSHLVEALYLVCGERGFX₄₅ (SEQ ID NO: 15), wherein the B chain is linked to the A chain through disulfide linkages; and
[0310] R₂₂ is a bond, or a 1 to 4 amino acid sequence selected from the group consisting of a FVNQ (SEQ ID NO: 12), FVKQ (SEQ ID NO: 8), VNQ, NQ and Q;
[0311] X₈ is selected from the group consisting of threonine and histidine;
[0312] X₂₁ is selected from the group consisting of asparagine, lysine, glycine, alanine; and
[0313] X₄₅ is histidine, tyrosine or phenylalanine; and a linear chain spacer joining the incretin to the insulin peptide, wherein the spacer comprises the general structure of

[chemical structure]

wherein the cysteine amino acid of the linear chain spacer is linked to the carboxy terminus of the incretin via an amide bond and Q₁ is the N-terminus of the insulin B chain. In a further embodiment the insulin peptide comprises an A chain sequence of GIVEQCCTSICSLYQLENYCN-R₁₃ (SEQ ID NO: 1); and a B chain sequence selected from the group consisting of FVNQHLCGSHLVEALYLVCGERGFFYTPKT (SEQ ID NO: 2), FVNQHLCGSHLVEALYLVCGERGFFYTKPT (SEQ ID NO: 9), FVNQHLCGSHLVEALYLVCGERGFFYTDKT (SEQ ID NO: 5) and FVKQHLCGSHLVEALYLVCGERGFFYTEKT (SEQ ID NO: 6). In one embodiment the insulin component is a two chain insulin.

[0314] In one embodiment the incretin comprises the general structure of

[chemical structure]

wherein I₁ is an incretin selected from the group consisting of SEQ ID NOs: 1987, 1993, 2014, and 2015, linked via its carboxy terminus to the cysteine of Formula V via an amide bond and Q₁ is an insulin peptide linked via the N-terminus of the B chain, wherein the A chain comprises a sequence of GIVEQCCTSICSLYQLENYCN-R₁₃ (SEQ ID NO: 1); and the B chain comprises a sequence selected from the group consisting of FVNQHLCGSHLVEALYLVCGERGFFYTPKT (SEQ ID NO: 2), FVNQHLCGSHLVEALYLVCGERGFFYTKPT (SEQ ID NO: 9), FVNQHLCGSHLVEALYLVCGERGFFYTDKT (SEQ ID NO: 5) and FVKQHLCGSHLVEALYLVCGERGFFYTEKT (SEQ ID NO: 6), or an increlin that differs from SEQ ID NOs: 1987, 1993, 2014, and 2015 by 1 or 2 amino acid substitutions and/or an insulin A chain that differs from SEQ ID NO: 1 by 1 or 2 amino acid substitutions and/or an insulin B chain that differs from SEQ ID NO: 2 by 1 or 2 amino acid substitutions.

### Insulin Peptides

[0315] The insulin peptide component of the conjugates of the present disclosure may comprise the native B and A chain sequences of human insulin (SEQ ID NOs: 1 and 2, respectively) or any of the known analogs or derivatives thereof that exhibit insulin agonist activity when linked to one another in a heteroduplex. Such analogs include, for example, proteins having an A-chain and a B-chain that differ from the A-chain and B-chain of human insulin by having one or more amino acid deletions, one or more amino acid substitutions, and/or one or more amino acid insertions that do not destroy the insulin activity of the insulin analog. The insulin peptide component of the conjugate can include, for example, any insulin peptide disclosed in published international applications WO96/34882, WO 2010/080607, WO 2010/080609, WO 2011/159882, WO/2011/159895 and U.S. Pat. No. 6,630,348, the disclosures of which are incorporated herein by reference.

[0316] In one embodiment the insulin peptide is an insulin analog wherein:

[0317] (a) the amino acid residue at position B28 is substituted with Asp, Lys, Leu, Val, or Ala, and the amino acyl residue at position B29 is Lys or Pro;

[0318] (b) the amino acid residues at any of positions B27, B28, B29, and B30 are deleted or substituted with a nonnative amino acid. In one embodiment an insulin analog is provided comprising an Asp substituted at position B28, or a Lys substituted at position 28 and a proline substituted at position B29. Additional insulin analogs are disclosed in Chance, et al., U.S. Pat. No. 5,514,646; Chance, et al., U.S. patent application Ser. No. 08/255,297; Brems, et al., Protein Engineering, 5:527-533 (1992); Brange, et al., EPO Publication No. 214,826 (published Mar. 18, 1987); and Brange, et al., Current Opinion in Structural Biology, 1:934-940 (1991). The disclosures of which are expressly incorporated herein by reference.

[0319] Insulin analogs may also have replacements of the amidated amino acids with acidic forms. For example, Asn may be replaced with Asp or Glu. Likewise, Gln may be replaced with Asp or Glu. In particular, Asn(A18), Asn(A21), or Asp(B3), or any combination of those residues, may be replaced by Asp or Glu. Also, Gln(A15) or Gln(B4), or both, may be replaced by either Asp or Glu.

[0320] As disclosed herein single chain insulin agonists are provided comprising a B chain and an A chain of human insulin, or analogs or derivative thereof, wherein the carboxy terminus of the B chain is linked to the amino terminus of the A chain via a linking moiety. In one embodiment the A chain is an amino acid sequence selected from the group consisting of GIVEQCCTSICSLYQLENYCN (SEQ ID NO: 1), GIVDECCFRSCDLRRLEMYCA (SEQ ID NO: 68) or GIVEECCFRSCDLALLETYCA (SEQ ID NO: 70) and the B chain comprises the sequence FVNQHLCGSHLVEALYLVCGERGFFYTPKT (SEQ ID NO: 2), GPETLCGAELVDALYLVCGDRGFYFNKPT (SEQ ID NO: 69) or AYRPSETLCGGELVDTLYLVCGDRGFYFSRPA (SEQ ID NO: 71), or a carboxy shortened sequence thereof having one to five amino acids corresponding to B26, B27, B28, B29 and B30 deleted, and analogs of those sequences wherein each sequence is modified to comprise one to five amino acid substitutions at positions corresponding to native insulin positions (see peptide alignment shown in FIG. 1) selected from A5, A8, A9, A10, A14, A15, A17, A18, A21, B1, B2, B3, B4, B5, B9, B10, B13, B14, B20, B22, B23, B26, B27, B28, B29 and B30. In one embodiment the amino acid substitutions are conservative amino acid substitutions. Suitable amino acid substitutions at these positions that do not adversely impact insulin's desired activities are known to those skilled in the art, as demonstrated, for example, in Mayer, et al., Insulin Structure and Function, Biopolymers. 2007; 88(5):687-713, the disclosure of which is incorporated herein by reference.

[0321] Additional amino acid sequences can be added to the amino terminus of the B chain or to the carboxy terminus of the A chain of the single chain insulin agonists of the present invention. For example, a series of negatively charged amino acids can be added to the amino terminus of the B chain, including for example a peptide of 1 to 12, 1 to 10, 1 to 8 or 1 to 6 amino acids in length and comprising one or more negatively charged amino acids including for example glutamic acid and aspartic acid. In one embodiment the B chain amino terminal extension comprises 1 to 6 charged amino acids. In accordance with one embodiment the incretin-insulin conjugates disclosed herein comprise a C-terminal amide or ester in place of a C-terminal carboxylate on the A chain.

[0322] High potency incretin-insulin conjugates can also be prepared based on using a modified IGF I and IGF II sequence described in published International application no. WO 2010/080607, the disclosure of which is expressly incorporated herein by reference, as the insulin peptide component. More particularly, analogs of IGF I and IGF II that comprise a substitution of a tyrosine leucine dipeptide for the native IGF amino acids at positions corresponding to B16 and B17 of native insulin have a tenfold increase in potency at the insulin receptor.

[0323] In accordance with one embodiment the insulin peptide for use in the present disclosure comprises a B chain sequence of R₂₂-X₂₅LCGX₂₉X₃₀LVX₃₃X₃₄LYLVCGX₄₁X₄₂GFX₄₅ (SEQ ID NO: 20) and an A chain sequence of GIVX₄X₅CCX₈X₉X₁₀CX₁₂LX₁₄X₁₅LX₁₇X₁₈YCX₂₁-R₄₄ (SEQ ID NO: 19) wherein

[0324] X₄ is glutamic acid or aspartic acid;

[0325] X₅ is glutamine or glutamic acid

[0326] X₈ is histidine, threonine or phenylalanine;

[0327] X₉ is serine, arginine, lysine, ornithine or alanine;

[0328] X₁₀ is isoleucine or serine;

[0329] X₁₂ is serine or aspartic acid

[0330] X₁₄ is tyrosine, arginine, lysine, ornithine or alanine;

[0331] X₁₅ is glutamine, glutamic acid, arginine, alanine, lysine, ornithine or leucine;

[0332] X₁₇ is glutamine, glutamic acid, arginine, aspartic acid or lysine, ornithine

[0333] X₁₈ is methionine, asparagine, glutamine, aspartic acid, glutamic acid or threonine;

[0334] X₂₁ is selected from the group consisting of alanine, glycine, serine, valine, threonine, isoleucine, leucine, glutamine, glutamic acid, asparagine, aspartic acid, histidine, tryptophan, tyrosine, and methionine;

[0335] X₂₅ is histidine or threonine;

[0336] X₂₉ is selected from the group consisting of alanine, glycine and serine;

[0337] X₃₀ is selected from the group consisting of histidine, aspartic acid, glutamic acid, homocysteic acid and cysteic acid;

[0338] X₃₃ is selected from the group consisting of aspartic acid, glutamine and glutamic acid;

[0339] X₃₄ is selected from the group consisting of alanine and threonine;

[0340] X₄₁ is selected from the group consisting of glutamic acid, aspartic acid or asparagine;

[0341] X₄₂ is selected from the group consisting of alanine, lysine, ornithine and arginine;

[0342] X₄₅ is tyrosine, histidine, asparagine or phenylalanine;

[0343] R₂₂ is selected from the group consisting of AYRPSE (SEQ ID NO: 14), FVNQ (SEQ ID NO: 12), PGPE (SEQ ID NO: 11), a tripeptide glycine-proline-glutamic acid, a tripeptide valine-asparagine-glutamine, a dipeptide proline-glutamic acid, a dipeptide asparagine-glutamine, glutamine, glutamic acid and a bond; and R₁₃ is COOH or CONH₂. In one embodiment the A chain and the B chain are linked to one another by disulfide bonds, including those that form between the A and B chains of native insulin. In an alternative embodiment the A and B chains are linked together as a linear single chain-insulin peptide.

[0344] In accordance with one embodiment an insulin analog is provided wherein the A chain of the insulin peptide comprises the sequence GIVEQCCX₅SICSLYQLENYCX₂₁R₁₃ (SEQ ID NO: 3) or an analog thereof having 1 or 2 amino acid substitutions at a position selected from A5, A9, A10, A12, A14, A15, A17, A18, and the B chain comprising the sequence R₂₂-X₂₅LCGX₂₉X₃₀LVX₃₃X₃₄LYLVCGX₄₁X₄₂GFX₄₅YT-Z-B₁ (SEQ ID NO: 67), wherein

[0345] X₈ is selected from the group consisting of threonine and histidine;

[0346] X₂₁ is asparagine or glycine;

[0347] X₂₅ is histidine or threonine;

[0348] X₂₉ is selected from the group consisting of alanine, glycine and serine;

[0349] X₃₀ is selected from the group consisting of histidine, aspartic acid, glutamic acid, homocysteic acid and cysteic acid;

[0350] X₃₃ is selected from the group consisting of aspartic acid and glutamic acid;

[0351] X₃₄ is selected from the group consisting of alanine and threonine;

[0352] X₄₁ is selected from the group consisting of glutamic acid, aspartic acid or asparagine;

[0353] X₄₂ is selected from the group consisting of alanine, ornithine, lysine and arginine;

[0354] X₄₅ is tyrosine or phenylalanine;

[0355] R₂₂ is selected from the group consisting of FVNQ (SEQ ID NO: 12), a tripeptide valine-asparagine-glutamine, a dipeptide asparagine-glutamine, glutamine and an N-terminal amine

[0356] Z₁ is a dipeptide selected from the group consisting of aspartate-lysine, lysine-proline, and proline-lysine; and

[0357] B₁ is selected from the group consisting of threonine, alanine or a threonine-arginine-arginine tripeptide.

### Single Chain Insulin Peptide Agonists

[0358] As disclosed herein linking moieties can be used to link human insulin A and B chains, or analogs or derivatives thereof, wherein the carboxy terminus of the B25 amino acid of the B chain is directly linked to a first end of a linking moiety, wherein the second end of the linking moiety is directly linked to the amino terminus of the A1 amino acid of the A chain via the intervening linking moiety.

[0359] In accordance with one embodiment the insulin peptide is a single chain insulin agonist that comprises the general structure B-LM-A wherein B represents an insulin B chain, A represents an insulin A chain, and LM represents a linking moiety linking the carboxy terminus of the B chain to the amino terminus of the A chain. Suitable linking moieties for joining the B chain to the A chain are disclosed herein under the header Linking Moieties for Single Chain-Insulin Analogs and the respective subheaders “Peptide linkers” and “Non-Peptide Linkers”. In one embodiment the linking moiety comprises a linking peptide, and more particularly, in one embodiment the peptide represents an analog of the IGF-1 C peptide. Amino acid positions of the linking moiety are designated based on the corresponding position in the native C chain of IGF 1 (SEQ ID NO: 17). In another embodiment the peptide linking moiety comprises a 29 contiguous amino acid sequence having greater than 70%, 80%, 90% sequence identity to SSSSX₅₀APPPSLPSPSRLPGPSDTPILPQX₅₁ (SEQ ID NO: 1924), wherein X₅₀ and X₅₁ are independently selected from arginine and lysine. In one embodiment the linking moiety is a non-peptide linker comprising a relatively short bifunctional non-peptide polymer linker that approximates the length of an 8-16 amino acid sequence. In one embodiment the non-peptide linker has the structure:

[chemical structure]

m; wherein m is an integer ranging from 10 to 14 and the linking moiety is linked directly to the B25 amino acid of the B chain. In accordance with one embodiment the non-peptide linking moiety is a polyethylene glycol linker of approximately 4 to 20, 8 to 18, 8 to 16, 8 to 14, 8 to 12, 10 to 14, 10 to 12 or 11 to 13 monomers.

[0360] In one embodiment a incretin-insulin conjugate is provided that comprises an insulin peptide having the structure: IB-LM-IA, wherein IB comprises the sequence R₂₂-X₂₅LCGX₂₉X₃₀LVX₃₃X₃₄LYLVCGX₄₁X₄₂GFX₄₅ (SEQ ID NO: 20), LM is a linking moiety as disclosed herein that covalently links IB to IA, and IA comprises the sequence GIVX₄X₅CCX₈X₉X₁₀CX₁₂LX₁₄X₁₅LX₁₇X₁₈YCX₂₁-R₄₄ (SEQ ID NO: 19), wherein

[0361] X₄ is glutamic acid or aspartic acid;

[0362] X₅ is glutamine or glutamic acid;

[0363] X₅ is histidine or phenylalanine;

[0364] X₉ is selected from arginine, lysine, ornithine or alanine;

[0365] X₁₀ is isoleucine or serine;

[0366] X₁₂ is serine or aspartic acid;

[0367] X₁₄ is tyrosine, arginine, lysine, ornithine or alanine;

[0368] X₁₅ is arginine, lysine, ornithine or leucine;

[0369] X₁₇ is glutamic acid or glutamine;

[0370] X₁₈ is methionine, asparagine or threonine;

[0371] X₂₁ is alanine, glycine or asparagine;

[0372] X₂₅ is selected from the group consisting of histidine and threonine;

[0373] X₂₉ is selected from the group consisting of alanine, glycine and serine;

[0374] X₃₀ is selected from the group consisting of histidine, aspartic acid, glutamic acid, homocysteic acid and cysteic acid;

[0375] X₃₃ is selected from the group consisting of aspartic acid and glutamic acid;

[0376] X₃₄ is selected from the group consisting of alanine and threonine;

[0377] X₄₁ is selected from the group consisting of glutamic acid, aspartic acid or asparagine;

[0378] X₄₂ is selected from the group consisting of alanine, lysine, ornithine and arginine;

[0379] R₂₂ is selected from the group consisting of AYRPSE (SEQ ID NO: 14), FVNQ (SEQ ID NO: 12), PGPE (SEQ ID NO: 11), a tripeptide glycine-proline-glutamic acid, a tripeptide valine-asparagine-glutamine, a dipeptide proline-glutamic acid, a dipeptide asparagine-glutamine, glutamine, glutamic acid and an N-terminal amine; and

[0380] R₁₃ is COOH or CONH₂, further wherein the amino acid at the designation X₄₅ is directly bound to the linking moiety, LM (i.e., the designation IB-LM-IA as used herein is intended to represent that the B chain carboxyl terminus and the amino terminus of the A chain are directly linked to the linking moiety LM without any further intervening amino acids).

[0381] In one embodiment the linking moiety (LM) comprises an amino acid sequence of no more than 17 amino acids in length. In one embodiment the linking moiety comprises the sequence GYGSSSRR (SEQ ID NO: 61), GYGSSSRRAPQT (SEQ ID NO: 23) or GAGSSSRRAPQT (SEQ ID NO: 64)

[0382] In another embodiment the linking moiety comprises a 29 contiguous amino acid sequence, directly linked to the carboxy terminal amino acid of the B chain, wherein said 29 contiguous amino acid sequence has greater than 70%, 80%, 90% sequence identity to SSSSX₅₀APPPSLPSPSRLPGPSDTPILPQX₅₁ (SEQ ID NO: 1924), wherein X₅₀ and X₅₁ are independently selected from arginine and lysine. In one embodiment the linking peptide comprises a total of 29 to 158 or 29 to 58 amino acids and comprises the sequence of SEQ ID NO: 68. In another embodiment the linking moiety comprises a 29 contiguous amino acid sequence, directly linked to the carboxy terminal amino acid of the B chain, wherein said 29 contiguous amino acid sequence has greater than 90% sequence identity to SSSSX₅₀APPPSLPSPSRLPGPSDTPILPQX₅₁ (SEQ ID NO: 1924), wherein X₅₀ and X₅₁ are independently selected from arginine and lysine. In one embodiment the linking moiety comprises the sequence SSSSRAPPPSLPSPSRLPGPSDTPILPQK (SEQ ID NO: 1923) or SSSSKAPPPSLPSPSRLPGPSDTPILPQR (SEQ ID NO: 1922) optionally with one or two amino acid substitutions.

[0383] In accordance with one embodiment a single chain insulin agonist polypeptide is provided comprising a B chain and A chain of human insulin, or analogs or derivative thereof, wherein the last five carboxy amino acids of the native B chain are deleted (i.e., B26-B30), and amino acid B25 is linked to amino acid A1 of the A chain via an intervening linking moiety. In one embodiment the linking moiety comprises the structure:

[chemical structure]

wherein m is an integer ranging from 10 to 14 and the linking moiety is linked directly to the B25 amino acid of the B chain.

[0384] In one embodiment an incretin-insulin conjugate is provided comprising an insulin peptide having the general formula IB-LM-IA wherein IB comprises the sequence X₂₅LCGX₂₉X₃₀LVX₃₃X₃₄LYLVCGX₄₁X₄₂GFX₄₅ (SEQ ID NO: 20); LM comprises the sequence SSSSRAPPPSLPSPSRLPGPSDTPILPQK (SEQ ID NO: 1923), SSSSKAPPPSLPSPSRLPGPSDTPILPQR (SEQ ID NO: 1922), GYGSSSRR (SEQ ID NO: 61) or GAGSSSRR (SEQ ID NO: 1925); and

IA comprises the sequence GIVX₄X₅CCX₈X₉X₁₀CX₁₂LX₁₄X₁₅LX₁₇X₁₈YCX₂₁-R₄₄ (SEQ ID NO: 19) wherein

[0385] X₄ is glutamic acid or aspartic acid;

[0386] X₅ is glutamine or glutamic acid

[0387] X₈ is histidine, threonine or phenylalanine;

[0388] X₉ is serine, arginine, lysine, ornithine or alanine;

[0389] X₁₀ is isoleucine or serine;

[0390] X₁₂ is serine or aspartic acid;

[0391] X₁₄ is tyrosine, arginine, lysine, ornithine or alanine;

[0392] X₁₅ is glutamine, glutamic acid, arginine, alanine, lysine, ornithine or leucine;

[0393] X₁₇ is glutamic acid, aspartic acid, asparagine, lysine, ornithine or glutamine;

[0394] X₁₈ is methionine, asparagine, glutamine, aspartic acid, glutamic acid or threonine;

[0395] X₂₁ is selected from the group consisting of alanine, glycine, serine, valine, threonine, isoleucine, leucine, glutamine, glutamic acid, asparagine, aspartic acid, histidine, tryptophan, tyrosine, and methionine;

[0396] X₂₅ is histidine or threonine;

[0397] X₂₉ is selected from the group consisting of alanine, glycine and serine;

[0398] X₃₀ is selected from the group consisting of histidine, aspartic acid, glutamic acid, homocysteic acid and cysteic acid;

[0399] X₃₃ is selected from the group consisting of aspartic acid and glutamic acid;

[0400] X₃₄ is selected from the group consisting of alanine and threonine;

[0401] X₄₁ is selected from the group consisting of glutamic acid, aspartic acid or asparagine;

[0402] X₄₂ is selected from the group consisting of alanine, ornithine, lysine and arginine;

[0403] X₄₅ is tyrosine or phenylalanine;

[0404] R₂₂ is selected from the group consisting of AYRPSE (SEQ ID NO: 14), FVNQ (SEQ ID NO: 12), FVKQ (SEQ ID NO: 8), PGPE (SEQ ID NO: 11), a tripeptide glycine-proline-glutamic acid, a tripeptide valine-asparagine-glutamine, a dipeptide proline-glutamic acid, a dipeptide asparagine-glutamine, glutamine, glutamic acid and an N-terminal amine; and

[0405] R₄₄ is COOH or CONH₂

### Glycosylation

[0406] During nascent in vivo protein production insulin analogs comprising glycosylation sites may undergo further processing, known as post-translational modification, wherein sugar (glycosyl) residues may be added enzymatically in a process known as glycosylation. The resulting proteins bearing covalently linked oligosaccharide side chains are known as glycosylated proteins or glycoproteins. Accordingly, a protein that bears a glycosylation site is not necessarily glycosylated. In accordance with one embodiment insulin agonists analogs are provided that have been modified to comprise a peptide sequence that is prone to hyperglycosylation when expressed in a eukaryotic expression system.

[0407] Non-native and native glycosylation sequences are known to those skilled in the art and include N-linked glycosylation sites, and O-linked glycosylation sites. N-linked glycosylation sites are peptide sequences that serve as recognition sites for enzymatic attachment of a carbohydrate moiety to the side chain of an asparagine residue. The tripeptide O-linked glycosylation sequences include asparagine-X-serine and asparagine-X-threonine, where X is any amino acid except proline. Thus, the presence of either of these tripeptide sequences in a polypeptide creates a potential glycosylation site. O-linked glycosylation are peptide sequences that serve as recognition sites for enzymatic attachment of a carbohydrate moiety to the side chain of a hydroxyamino acid, most commonly serine or threonine, although 5-hydroxyproline or 5-hydroxylysine may also be used. In one embodiment the O-linked glycosylation sugar is N-aceylgalactosamine, galactose, or xylose. A number of O-linked glycosylation sites are known in the art and have been reported in the literature. See, e.g., Ten Hagen et al. (11029) J. Biol. Chem. 274(39):27867-74; Hanisch et al. (2001) Glycobiology 11:731-740; and Ten Hagen et al. (2003) Glycobiology 13:1R-16R.

[0408] In accordance with one embodiment a method of producing a hyperglycosylated insulin analog is provided. The method comprises providing a eukaryotic host cell that comprises a gene encoding an insulin analog that has been modified to include a non-native glycosylation site (e.g., a CTP peptide sequence) and culturing the cell under conditions that allow expression of the insulin analog gene. In one embodiment the host cell expresses human glycosylation enzymes such that glycosylated proteins (glycoproteins) produced in the host cell exhibit protein glycosylation identical to that of human cells (see US Patent Application Publication Nos. 2004/0018590 and 2002/0137134, the disclosures of which are incorporated herein by reference). In accordance with one embodiment the eukaryotic host cell is selected from yeast (e.g., Pichia pastoris) or mammalian (CHO or HEK293) cells.

[0409] In one embodiment a glycosylation site is introduced by the addition of amino acid sequences to the base insulin analog. More particularly, applicants have discovered that peptide sequence named C-terminal peptide (CTP: SSSSKAPPPSLPSPSRLPGPSDTPILPQR; SEQ ID NO: 1922), which is prone to O-linked hyperglycosylation when the protein is expressed in a eukaryotic cellular expression system can be covalently linked to an insulin analog without undermining the inherent in vitro activity of the insulin analog.

[0410] In accordance with one embodiment an insulin analog is provided comprising A chain and a B chain and a CTP peptide, wherein the CTP peptide is a peptide having at least 60, 70, 80, 85, 90, or 95% sequence identity with (SEQ ID NO: 1922). In one embodiment the CTP peptide is a peptide comprising a 18 to 29 amino acid sequence that shares at least 80, 82, 84, 86, 88, 90, 92, 94, 96 or 98% sequence identity with a 18 to 29 amino acid region of (SEQ ID NO: 1922). In one embodiment the CTP peptide comprises an analog of (SEQ ID NO: 1922), wherein said analog differs from (SEQ ID NO: 1922) by 1, 1 to 2, 3 to 4, 4 to 6 or up to 8 amino acid substitutions. In one embodiment the amino acid substitution are at one or more positions selected from 1-4, 7-15, 18, 20, 21, 24 and 27 of (SEQ ID NO: 1922). In one embodiment the amino acid substitution are at one or more positions selected from 1, 2, 3, 4, 10, 13, 15, and 21 of (SEQ ID NO: 1922). In one embodiment the amino acid substitution are at one or more positions selected from 7, 8, 9, 12, 14, 18, 20, 24 and 27 of (SEQ ID NO: 1922). In one embodiment the CTP peptide comprises a 29 amino acids sequence that differs from SEQ ID NO: 1922 by 1 to 2 amino acid substitutions. In a further embodiment the CTP peptide comprises a fragment of SEQ ID NO: 1922 wherein the fragment represents a 18 to 28 contiguous amino acid sequence identical to an amino acid sequence contained within SEQ ID NO: 1922.

[0411] Pegylation of Insulin Peptides

[0412] Applicants have discovered that covalent linkage of a hydrophilic moiety to the peptide or incretin of the incretin-insulin conjugate disclosed herein provide analogs having slower onset, extended duration and exhibit a basal profile of activity. In one embodiment, the incretin-insulin conjugates disclosed herein are further modified to comprise a hydrophilic moiety covalently linked to the side chain of an amino acid at a position selected from the group consisting of 24, 30 or 40 of the incretin peptide, and/or position A9, A14 and A15 of the A chain, at the N-terminal alpha amine of the B chain or at the side chain of an amino acid at position B1, B2, B3, B10, B22, B28 or B29 of the B chain or at any position of the linking moiety that links the A chain and B chain in an insulin single chain analog, or any combination thereof. In exemplary embodiments, this hydrophilic moiety is covalently linked to a Lys, Cys, Orn, homocysteine, or acetyl-phenylalanine residue at any of these positions. In one embodiment the insulin peptide is a single chain analog and the hydrophilic moiety is covalently linked to the side chain of an amino acid of the linking moiety joining the A and B chains.

[0413] Exemplary hydrophilic moieties include polyethylene glycol (PEG), for example, of a molecular weight of about 1,000 Daltons to about 40,000 Daltons, or about 20,000 Daltons to about 40,000 Daltons. Additional suitable hydrophilic moieties include, polypropylene glycol, polyoxyethylated polyols (e.g., POG), polyoxyethylated sorbitol, polyoxyethylated glucose, polyoxyethylated glycerol (POG), polyoxyalkylenes, polyethylene glycol propionaldehyde, copolymers of ethylene glycol/propylene glycol, monomethoxy-polyethylene glycol, mono-(C1-C10) alkoxy- or aryloxy-polyethylene glycol, carboxymethylcellulose, polyacetals, polyvinyl alcohol (PVA), polyvinyl pyrrolidone, poly-1, 3-dioxolane, poly-1,3,6-trioxane, ethylene/maleic anhydride copolymer, poly (beta-amino acids) (either homopolymers or random copolymers), poly(n-vinyl pyrrolidone)polyethylene glycol, propropylene glycol homopolymers (PPG) and other polyakylene oxides, polypropylene oxide/ethylene oxide copolymers, colonic acids or other polysaccharide polymers, Ficoll or dextran and mixtures thereof.

[0414] The hydrophilic moiety, e.g., polyethylene glycol chain in accordance with some embodiments has a molecular weight selected from the range of about 500 to about 40,000 Daltons. In one embodiment the hydrophilic moiety, e.g. PEG, has a molecular weight selected from the range of about 500 to about 5,000 Daltons, or about 1,000 to about 5,000 Daltons. In another embodiment the hydrophilic moiety, e.g., PEG, has a molecular weight of about 10,000 to about 20,000 Daltons. In yet other exemplary embodiment the hydrophilic moiety, e.g., PEG, has a molecular weight of about 20,000 to about 40,000 Daltons. In one embodiment the hydrophilic moiety, e.g. PEG, has a molecular weight of about 20,000 Daltons. In one embodiment an insulin peptide is provided wherein one or more amino acids of the analog are pegylated, and the combined molecular weight of the covalently linked PEG chains is about 20,000 Daltons.

[0415] In one embodiment dextrans are used as the hydrophilic moiety. Dextrans are polysaccharide polymers of glucose subunits, predominantly linked by al-6 linkages. Dextran is available in many molecular weight ranges, e.g., about 1 kD to about 100 kD, or from about 5, 10, 15 or 20 kD to about 20, 30, 40, 50, 60, 70, 80 or 90 kD.

[0416] Linear or branched polymers are contemplated. Resulting preparations of conjugates may be essentially monodisperse or polydisperse, and may have about 0.5, 0.7, 1, 1.2, 1.5 or 2 polymer moieties per peptide.

[0417] In one embodiment the hydrophilic moiety is a polyethylene glycol (PEG) chain, linked to the side chain of an amino acid at a position selected from the group consisting of 24, 30 or 40 of the incretin peptide, and/or at the side chain of an amino acid at position B28 or B29 of the B chain or at any position of the linking moiety that links the A chain and B chain in an insulin single chain analog, or any combination thereof. In one embodiment the incretin-insulin conjugate is pegylated at one, two or more amino acids at a position selected from the group consisting of 24, 30 or 40 of the incretin peptide, or at the side chain of an amino acid at position B1, B2, B3, B10, B22, B28 or B29 of the B chain or any combination thereof. In one embodiment the total molecular weight of the covalently linked PEG chain(s) is about 20,000 Daltons.

[0418] Hydrophilic moieties such as polyethylene glycol can be attached to the incretin-insulin conjugate under any suitable conditions used to react a protein with an activated polymer molecule. Any means known in the art can be used, including via acylation, reductive alkylation, Michael addition, thiol alkylation or other chemoselective conjugation/ligation methods through a reactive group on the PEG moiety (e.g., an aldehyde, amino, ester, thiol, α-haloacetyl, maleimido or hydrazino group) to a reactive group on the target compound (e.g., an aldehyde, amino, ester, thiol, α-haloacetyl, maleimido or hydrazino group). Activating groups which can be used to link the water soluble polymer to one or more proteins include without limitation sulfone, maleimide, sulfhydryl, thiol, triflate, tresylate, azidirine, oxirane and 5-pyridyl. If attached to the peptide by reductive alkylation, the polymer selected should have a single reactive aldehyde so that the degree of polymerization is controlled. See, for example, Kinstler et al., Adv. Drug. Delivery Rev. 54: 477-485 (2002); Roberts et al., Adv. Drug Delivery Rev. 54: 459-476 (2002); and Zalipsky et al., Adv. Drug Delivery Rev. 16: 157-182 (1995).

### Acylation

[0419] In some embodiments, the insulin peptide or incretin of the incretin-insulin conjugate is modified to comprise an acyl group. The acyl group can be covalently linked directly to an amino acid of the incretin-insulin conjugate, or indirectly to an amino acid of the incretin-insulin conjugate via a spacer, wherein the spacer is positioned between the amino acid of the incretin-insulin conjugate and the acyl group. The incretin-insulin conjugate may be acylated at the same amino acid position where a hydrophilic moiety is linked, or at a different amino acid position. For example, acylation may occur at any position including any of positions 10, 16, 30 or 40 of the incretin peptide or any amino acid of the A or B chains as well as a position within the linking moiety, provided that the activity exhibited by the non-acylated incretin-insulin conjugate is retained upon acylation. Nonlimiting examples include acylation at positions A14 and A15 of the A chain, or positions B1, B10, B22, B28 or B29 of the B chain or at any position of the linking moiety. Additional nonlimiting examples include acylation at positions 10, 16, and 20, as well as 30 or 40 for C-terminal extended incretin peptides.

[0420] In accordance with one embodiment the incretin of the incretin-insulin conjugate comprises a substitution of the native amino acid Tyr at position 10 with an amino acid of Formula Ia:

[chemical structure]

[0421] wherein n=1 to 4,

comprising a side chain covalently linked to an acyl group or alkyl group. In one embodiment n is 4.

[0422] In one specific aspect of the invention, the insulin analog is modified to comprise an acyl group by direct acylation of an amine, hydroxyl, or thiol of a side chain of an amino acid of the incretin-insulin conjugate. In some embodiments, the insulin analog is directly acylated through the side chain amine, hydroxyl, or thiol of an amino acid. In some embodiments, acylation is at position B28 or B29 (according to the amino acid numbering of the native insulin A and B chain sequences). In this regard, an insulin analog can be provided that has been modified by one or more amino acid substitutions in the A or B chain sequence, including for example at positions A14, A15, B1, B2, B10, B22, B28 or B29 (according to the amino acid numbering of the native insulin A and B chain sequences) or at any position of the linking moiety with an amino acid comprising a side chain amine, hydroxyl, or thiol. In some specific embodiments of the invention, the direct acylation of the insulin peptide occurs through the side chain amine, hydroxyl, or thiol of the amino acid at position B28 or B29 (according to the amino acid numbering of the native insulin A and B chain sequences).

[0423] In accordance with one embodiment, the acylated insulin analogs comprise a spacer between the peptide and the acyl group. In some embodiments, the incretin-insulin conjugate is covalently bound to the spacer, which is covalently bound to the acyl group. In some exemplary embodiments, the insulin peptide is modified to comprise an acyl group by acylation of an amine, hydroxyl, or thiol of a spacer, which spacer is attached to a side chain of an amino acid at position B28 or B29 (according to the amino acid numbering of the A or B chain of native insulin), or at any position of the spacer moiety. The amino acid of the incretin-insulin conjugate to which the spacer is attached can be any amino acid comprising a moiety which permits linkage to the spacer. For example, an amino acid comprising a side chain —NH₂, —OH, or —COOH (e.g., Lys, Orn, Ser, Asp, or Glu) is suitable.

[0424] In some embodiments, the spacer between the incretin-insulin conjugate and the acyl group is an amino acid comprising a side chain amine, hydroxyl, or thiol (or a dipeptide or tripeptide comprising an amino acid comprising a side chain amine, hydroxyl, or thiol). In some embodiments, the spacer comprises a hydrophilic bifunctional spacer. In a specific embodiment, the spacer comprises an amino poly(alkyloxy)carboxylate. In this regard, the spacer can comprise, for example, NH₂(CH₂CH₂O)ₙ(CH₂)ₘCOOH, wherein m is any integer from 1 to 6 and n is any integer from 2 to 12, such as, e.g., 8-amino-3,6-dioxaoctanoic acid, which is commercially available from Peptides International, Inc. (Louisville, Ky.). In one embodiment, the hydrophilic bifunctional spacer comprises two or more reactive groups, e.g., an amine, a hydroxyl, a thiol, and a carboxyl group or any combinations thereof. In certain embodiments, the hydrophilic bifunctional spacer comprises a hydroxyl group and a carboxylate. In other embodiments, the hydrophilic bifunctional spacer comprises an amine group and a carboxylate. In other embodiments, the hydrophilic bifunctional spacer comprises a thiol group and a carboxylate.

[0425] In some embodiments, the spacer between peptide the incretin-insulin conjugate and the acyl group is a hydrophobic bifunctional spacer. Hydrophobic bifunctional spacers are known in the art. See, e.g., Bioconjugate Techniques, G. T. Hermanson (Academic Press, San Diego, Calif., 1996), which is incorporated by reference in its entirety. In accordance with certain embodiments the bifunctional spacer can be a synthetic or naturally occurring amino acid comprising an amino acid backbone that is 3 to 10 atoms in length (e.g., 6-amino hexanoic acid, 5-aminovaleric acid, 7-aminoheptanoic acid, and 8-aminooctanoic acid). Alternatively, the spacer can be a dipeptide or tripeptide spacer having a peptide backbone that is 3 to 10 atoms (e.g., 6 to 10 atoms) in length. Each amino acid of the dipeptide or tripeptide spacer attached to the incretin-insulin conjugate can be independently selected from the group consisting of: naturally-occurring and/or non-naturally occurring amino acids, including, for example, any of the D or L isomers of the naturally-occurring amino acids (Ala, Cys, Asp, Glu, Phe, Gly, His, Ile, Lys, Leu, Met, Asn, Pro, Arg, Ser, Thr, Val, Trp, Tyr), or any D or L isomers of the non-naturally occurring amino acids selected from the group consisting of: β-alanine (β-Ala), N-α-methyl-alanine (Me-Ala), aminobutyric acid (Abu), α-aminobutyric acid (γ-Abu), aminohexanoic acid (ε-Ahx), aminoisobutyric acid (Aib), aminomethylpyrrole carboxylic acid, aminopiperidinecarboxylic acid, aminoserine (Ams), aminotetrahydropyran-4-carboxylic acid, arginine N-methoxy-N-methyl amide, β-aspartic acid (β-Asp), azetidine carboxylic acid, 3-(2-benzothiazolyl)alanine, α-tert-butylglycine, 2-amino-5-ureido-n-valeric acid (citrulline, Cit), β-Cyclohexylalanine (Cha), acetamidomethyl-cysteine, diaminobutanoic acid (Dab), diaminopropionic acid (Dpr), dihydroxyphenylalanine (DOPA), dimethylthiazolidine (DMTA), γ-Glutamic acid (γ-Glu), homoserine (Hse), hydroxyproline (Hyp), isoleucine N-methoxy-N-methyl amide, methyl-isoleucine (MeIle), isonipecotic acid (Isn), methyl-leucine (MeLeu), methyl-lysine, dimethyl-lysine, trimethyl-lysine, methanoproline, methionine-sulfoxide (Met(O)), methionine-sulfone (Met(O2)), norleucine (Nle), methyl-norleucine (Me-Nle), norvaline (Nva), ornithine (Orn), para-aminobenzoic acid (PABA), penicillamine (Pen), methylphenylalanine (MePhe), 4-Chlorophenylalanine (Phe(4-C1)), 4-fluorophenylalanine (Phe(4-F)), 4-nitrophenylalanine (Phe(4-NO2)), 4-cyanophenylalanine ((Phe(4-CN)), phenylglycine (Phg), piperidinylalanine, piperidinylglycine, 3,4-dehydroproline, pyrrolidinylalanine, sarcosine (Sar), selenocysteine (Sec), U-Benzyl-phosphoserine, 4-amino-3-hydroxy-6-methylheptanoic acid (Sta), 4-amino-5-cyclohexyl-3-hydroxypentanoic acid (ACHPA), 4-amino-3-hydroxy-5-phenylpentanoic acid (AHPPA), 1,2,3,4,-tetrahydro-isoquinoline-3-carboxylic acid (Tic), tetrahydropyranglycine, thienylalanine (Thi), U-Benzyl-phosphotyrosine, O-Phosphotyrosine, methoxytyrosine, ethoxytyrosine, O-(bis-dimethylamino-phosphono)-tyrosine, tyrosine sulfate tetrabutylamine, methyl-valine (MeVal), 1-amino-1-cyclohexane carboxylic acid (Acx), aminovaleric acid, beta-cyclopropyl-alanine (Cpa), propargylglycine (Prg), allylglycine (Alg), 2-amino-2-cyclohexyl-propanoic acid (2-Cha), tertbutylglycine (Tbg), vinylglycine (Vg), 1-amino-1-cyclopropane carboxylic acid (Acp), 1-amino-1-cyclopentane carboxylic acid (Acpe), alkylated 3-mercaptopropionic acid, 1-amino-1-cyclobutane carboxylic acid (Acb). In some embodiments the dipeptide spacer is selected from the group consisting of: Ala-Ala, β-Ala-β-Ala, Leu-Leu, Pro-Pro, γ-aminobutyric acid-γ-aminobutyric acid, and γ-Glu-γ-Glu.

[0426] The peptide the incretin-insulin conjugate can be modified to comprise an acyl group by acylation of a long chain alkane of any size and can comprise any length of carbon chain. The long chain alkane can be linear or branched. In certain aspects, the long chain alkane is a C₄ to C₃₀ alkane. For example, the long chain alkane can be any of a C₄ alkane, C₆ alkane, C₈ alkane, C₁₀ alkane, C₁₂ alkane, C₁₄ alkane, C₁₆ alkane, C₁₈ alkane, C₂₀ alkane, C₂₂ alkane, C₂₄ alkane, C₂₆ alkane, C₂₈ alkane, or a C₃₀ alkane. In some embodiments, the long chain alkane comprises a C₈ to C₂₀ alkane, e.g., a C₁₄ alkane, C₁₆ alkane, or a C₁₈ alkane.

[0427] In some embodiments, an amine, hydroxyl, or thiol group of the incretin-insulin conjugate is acylated with a cholesterol acid. In a specific embodiment, the peptide is linked to the cholesterol acid through an alkylated des-amino Cys spacer, i.e., an alkylated 3-mercaptopropionic acid spacer. Suitable methods of peptide acylation via amines, hydroxyls, and thiols are known in the art. See, for example, Miller, Biochem Biophys Res Commun 218: 377-382 (1996); Shimohigashi and Stammer, Int J Pept Protein Res 19: 54-62 (1982); and Previero et al., Biochim Biophys Acta 263: 7-13 (1972) (for methods of acylating through a hydroxyl); and San and Silvius, J Pept Res 66: 169-180 (2005) (for methods of acylating through a thiol); Bioconjugate Chem. “Chemical Modifications of Proteins: History and Applications” pages 1, 2-12 (1990); Hashimoto et al., Pharmaceutical Res. “Synthesis of Palmitoyl Derivatives of Insulin and their Biological Activity” Vol. 6, No: 2 pp. 171-176 (1989).

[0428] The acyl group of the acylated peptide the incretin-insulin conjugate can be of any size, e.g., any length carbon chain, and can be linear or branched. In some specific embodiments of the invention, the acyl group is a C₄ to C₃₀ fatty acid. For example, the acyl group can be any of a C₄ fatty acid, C₆ fatty acid, C₈ fatty acid, C₁₀ fatty acid, C₁₂ fatty acid, C₁₄ fatty acid, C₁₆ fatty acid, C₁₈ fatty acid, C₂₀ fatty acid, C₂₂ fatty acid, C₂₄ fatty acid, C₂₆ fatty acid, C₂₈ fatty acid, or a C₃₀ fatty acid. In some embodiments, the acyl group is a C₈ to C₂₀ fatty acid, e.g., a C₁₄ fatty acid or a C₁₆ fatty acid.

[0429] In an alternative embodiment, the acyl group is a bile acid. The bile acid can be any suitable bile acid, including, but not limited to, cholic acid, chenodeoxycholic acid, deoxycholic acid, lithocholic acid, taurocholic acid, glycocholic acid, and cholesterol acid.

### Alkylation

[0430] In some embodiments, the incretin-insulin conjugate is modified to comprise an alkyl group. The alkyl group can be covalently linked directly to an amino acid of the insulin peptide or the incretin peptide, or indirectly to an amino acid of the incretin-insulin conjugate via a spacer, wherein the spacer is positioned between the amino acid of the incretin-insulin conjugate and the alkyl group. The alkyl group can be attached to the incretin-insulin conjugate via an ether, thioether, or amino linkage. For example, the incretin-insulin conjugate may be alkylated at the same amino acid position where a hydrophilic moiety is linked, or at a different amino acid position.

[0431] Alkylation can be carried out at any position within the incretin-insulin conjugate, including for example at position 10, 16, 30 or 40 of the incretin peptide or in the C-terminal region of the B chain or at a position in the linking moiety, provided that insulin activity is retained. In a specific aspect of the invention, the incretin-insulin conjugate is modified to comprise an alkyl group by direct alkylation of an amine, hydroxyl, or thiol of a side chain of an amino acid of the incretin-insulin conjugate. In some embodiments, the incretin-insulin conjugate is directly alkylated through the side chain amine, hydroxyl, or thiol of an amino acid. In some specific embodiments of the invention, the direct alkylation of the incretin-insulin conjugate occurs through the side chain amine, hydroxyl, or thiol of the amino acid at position A14, A15, B1 (for insulin based B chains), B2 (for IGF-1 based B chains), B10, B22, B28 or B29 (according to the amino acid numbering of the A and B chain of native insulin). Nonlimiting examples include alkylation at positions A14 and A15 of the A chain, or positions B1, B10, B22, B28 or B29 of the B chain or at any position of the linking moiety. Additional nonlimiting examples include alkylation at positions 10, 16, and 20, as well as 30 or 40 for C-terminal extended incretin peptides.

[0432] In some embodiments of the invention, the incretin-insulin conjugate comprises a spacer between the peptide and the alkyl group. In some embodiments, the incretin-insulin conjugate is covalently bound to the spacer, which is covalently bound to the alkyl group. In some exemplary embodiments, the incretin-insulin conjugate is modified to comprise an alkyl group by alkylation of an amine, hydroxyl, or thiol of the conjugate, wherein the spacer is attached to a side chain of an amino acid at position A14, A15, B1 (for insulin based B chains), B2 (for IGF-1 based B chains), B10, B22, B28 or B29 (according to the amino acid numbering of the A and B chains of native insulin) or at position 10, 16, 30 or 40 of the incretin peptide. The amino acid of the incretin-insulin conjugate to which the spacer is attached can be any amino acid (e.g., a singly α-substituted amino acid or an α,α-disubstituted amino acid) comprising a moiety which permits linkage to the spacer. An amino acid of the incretin-insulin conjugate comprising a side chain —NH₂, —OH, or —COOH (e.g., Lys, Orn, Ser, Asp, or Glu) is suitable. In some embodiments, the spacer between the peptide the incretin-insulin conjugate and the alkyl group is an amino acid comprising a side chain amine, hydroxyl, or thiol or a dipeptide or tripeptide comprising an amino acid comprising a side chain amine, hydroxyl, or thiol.

[0433] In the instance in which the alpha amine is alkylated, the spacer amino acid can be any amino acid. For example, the spacer amino acid can be a hydrophobic amino acid, e.g., Gly, Ala, Val, Leu, Ile, Trp, Met, Phe, Tyr. Alternatively, the spacer amino acid can be an acidic residue, e.g., Asp and Glu. In exemplary embodiments, the spacer amino acid can be a hydrophobic amino acid, e.g., Gly, Ala, Val, Leu, Ile, Trp, Met, Phe, Tyr, 6-amino hexanoic acid, 5-aminovaleric acid, 7-aminoheptanoic acid, 8-aminooctanoic acid. Alternatively, the spacer amino acid can be an acidic residue, e.g., Asp and Glu, provided that the alkylation occurs on the alpha amine of the acidic residue. In the instance in which the side chain amine of the spacer amino acid is alkylated, the spacer amino acid is an amino acid comprising a side chain amine, e.g., an amino acid of Formula Ia (e.g., Lys or Orn). In this instance, it is possible for both the alpha amine and the side chain amine of the spacer amino acid to be alkylated, such that the peptide is dialkylated. Embodiments of the invention include such dialkylated molecules.

[0434] In some embodiments, the spacer comprises a hydrophilic bifunctional spacer. In a specific embodiment, the spacer comprises an amino poly(alkyloxy)carboxylate. In this regard, the spacer can comprise, for example, NH₂(CH₂CH₂O)ₙ(CH₂)ₘCOOH, wherein m is any integer from 1 to 6 and n is any integer from 2 to 12, such as, e.g., 8-amino-3,6-dioxaoctanoic acid, which is commercially available from Peptides International, Inc. (Louisville, Ky.). In some embodiments, the spacer between peptide the incretin-insulin conjugate and the alkyl group is a hydrophilic bifunctional spacer. In certain embodiments, the hydrophilic bifunctional spacer comprises two or more reactive groups, e.g., an amine, a hydroxyl, a thiol, and a carboxyl group or any combinations thereof. In certain embodiments, the hydrophilic bifunctional spacer comprises a hydroxyl group and a carboxylate. In other embodiments, the hydrophilic bifunctional spacer comprises an amine group and a carboxylate. In other embodiments, the hydrophilic bifunctional spacer comprises a thiol group and a carboxylate.

[0435] The spacer (e.g., amino acid, dipeptide, tripeptide, hydrophilic bifunctional spacer, or hydrophobic bifunctional spacer) is 3 to 10 atoms (e.g., 6 to 10 atoms, (e.g., 6, 7, 8, 9, or 10 atoms)) in length. In more specific embodiments, the spacer is about 3 to 10 atoms (e.g., 6 to 10 atoms) in length and the alkyl is a C₁₂ to C₁₈ alkyl group, e.g., C₁₄ alkyl group, C₁₆ alkyl group, such that the total length of the spacer and alkyl group is 14 to 28 atoms, e.g., about 14, 15, 16, 17, 18, 19, 20, 21, 22, 23, 24, 25, 26, 27, or 28 atoms. In some embodiments the length of the spacer and alkyl is 17 to 28 (e.g., 19 to 26, 19 to 21) atoms.

[0436] In accordance with one embodiment the bifunctional spacer is a synthetic or non-naturally occurring amino acid comprising an amino acid backbone that is 3 to 10 atoms in length (e.g., 6-amino hexanoic acid, 5-aminovaleric acid, 7-aminoheptanoic acid, and 8-aminooctanoic acid). Alternatively, the spacer can be a dipeptide or tripeptide spacer having a peptide backbone that is 3 to 10 atoms (e.g., 6 to 10 atoms) in length. The dipeptide or tripeptide spacer attached to the incretin-insulin conjugate can be composed of naturally-occurring and/or non-naturally occurring amino acids, including, for example, any of the amino acids taught herein. In some embodiments the spacer comprises an overall negative charge, e.g., comprises one or two negatively charged amino acids. In some embodiments the dipeptide spacer is selected from the group consisting of: Ala-Ala, β-Ala-β-Ala, Leu-Leu, Pro-Pro, γ-aminobutyric acid-γ-aminobutyric acid, and γ-Glu-γ-Glu. In one embodiment the dipeptide spacer is γ-Glu-γ-Glu.

[0437] Suitable methods of peptide alkylation via amines, hydroxyls, and thiols are known in the art. For example, a Williamson ether synthesis can be used to form an ether linkage between the insulin peptide and the alkyl group. Also, a nucleophilic substitution reaction of the peptide with an alkyl halide can result in any of an ether, thioether, or amino linkage. The alkyl group of the alkylated peptide the incretin-insulin conjugate can be of any size, e.g., any length carbon chain, and can be linear or branched. In some embodiments of the invention, the alkyl group is a C₄ to C₃₀ alkyl. For example, the alkyl group can be any of a C₄ alkyl, C₆ alkyl, C₈ alkyl, C₁₀ alkyl, C₁₂ alkyl, C₁₄ alkyl, C₁₆ alkyl, C₁₈ alkyl, C₂₀ alkyl, C₂₂ alkyl, C₂₄ alkyl, C₂₆ alkyl, C₂₈ alkyl, or a C₃₀ alkyl. In some embodiments, the alkyl group is a C₈ to C₂₀ alkyl, e.g., a C₁₄ alkyl or a C₁₆ alkyl.

[0438] In some specific embodiments, the alkyl group comprises a steroid moiety of a bile acid, e.g., cholic acid, chenodeoxycholic acid, deoxycholic acid, lithocholic acid, taurocholic acid, glycocholic acid, and cholesterol acid.

[0439] When a long chain alkane is alkylated by the incretin-insulin conjugate or the spacer, the long chain alkane may be of any size and can comprise any length of carbon chain. The long chain alkane can be linear or branched. In certain aspects, the long chain alkane is a C₄ to C₃₀ alkane. For example, the long chain alkane can be any of a C₄ alkane, C₆ alkane, C₈ alkane, C₁₀ alkane, C₁₂ alkane, C₁₄ alkane, C₁₆ alkane, C₁₈ alkane, C₂₀ alkane, C₂₂ alkane, C₂₄ alkane, C₂₆ alkane, C₂₈ alkane, or a C₃₀ alkane. In some embodiments the long chain alkane comprises a C₈ to C₂₀ alkane, e.g., a C₁₄ alkane, C₁₆ alkane, or a C₁₈ alkane.

[0440] Also, in some embodiments alkylation can occur between the insulin analog and a cholesterol moiety. For example, the hydroxyl group of cholesterol can displace a leaving group on the long chain alkane to form a cholesterol-insulin peptide product.

### Controlled Release Formulations

[0441] Alternatively, the incretin-insulin conjugates described herein can be modified into a depot form, such that the manner in which the conjugate of the present disclosure is released into the body to which it is administered is controlled with respect to time and location within the body (see, for example, U.S. Pat. No. 4,450,150). Depot forms of the conjugates of the present disclosure can be, for example, an implantable composition comprising the conjugate of the present disclosure and a porous or non-porous material, such as a polymer, wherein the conjugate of the present disclosure is encapsulated by or diffused throughout the material and/or degradation of the non-porous material. The depot is then implanted into the desired location within the body and the conjugate of the present disclosure are released from the implant at a predetermined rate.

[0442] Alternatively, a large depot polymer can be linked to a self-cleaving dipeptide element that is covalently bound to the conjugate as described herein. In this embodiment, the depot polymer effectively sequesters the incretin-insulin conjugate at its site of administration until it is subsequently cleaved from the single chain analog via a non-enzymatic reaction at a predetermined rate. Depot formulations of insulin analogs using a self-cleaving dipeptide have been described in published international application no. WO 2010/080607, the disclosure of which is incorporated herein. In one embodiment a incretin-insulin conjugate is provided comprising a dipeptide prodrug element wherein the dipeptide prodrug element is linked to a large polymer such as PEG or dextran. In one embodiment a self-cleaving dipeptide element comprising a large depot polymer (including for example, PEG) is linked to the side chain of an amino acid of the linking moiety, including for example, the amino acid at position C8 of the linking moiety.

[0443] Pharmaceutical compositions can be prepared that comprise the single chain analogs and are formulated to have a desired in vivo release profile. In some aspects, the pharmaceutical composition is an immediate release, controlled release, sustained release, extended release, delayed release, or bi-phasic release formulation. Methods of formulating peptides or conjugates for controlled release are known in the art. See, for example, J Pharm 374: 46-52 (2009) and International Patent Application Publication Nos. WO 2008/130158, WO2004/033036; WO2000/032218; and WO 1999/040942. The instant compositions may further comprise, for example, micelles or liposomes, or some other encapsulated form, or may be administered in an extended release form to provide a prolonged storage and/or delivery effect. The disclosed pharmaceutical formulations may be administered according to any regime including, for example, daily (1 time per day, 2 times per day, 3 times per day, 4 times per day, 5 times per day, 6 times per day), every two days, every three days, every four days, every five days, every six days, weekly, bi-weekly, every three weeks, monthly, or bi-monthly.

[0444] In accordance with one embodiment the depot polymer is selected from biocompatible polymers known to those skilled in the art. The depot polymers typically have a size selected from a range of about 20,000 to 120,000 Daltons. In one embodiment the depot polymer has a size selected from a range of about 40,000 to 100,000 or about 40,000 to 80,000 Daltons. In one embodiment the depot polymer has a size of about 40,000, 50,000, 60,000, 70,000 or 80,000 Daltons. Suitable depot polymers include but are not limited to dextrans, polylactides, polyglycolides, caprolactone-based polymers, poly(caprolactone), polyanhydrides, polyamines, polyesteramides, polyorthoesters, polydioxanones, polyacetals, polyketals, polycarbonates, polyphosphoesters, polyesters, polybutylene terephthalate, polyorthocarbonates, polyphosphazenes, succinates, poly(malic acid), poly(amino acids), polyvinylpyrrolidone, polyethylene glycol, polyhydroxycellulose, polysaccharides, chitin, chitosan, hyaluronic acid, and copolymers, terpolymers and mixtures thereof, and biodegradable polymers and their copolymers including caprolactone-based polymers, polycaprolactones and copolymers which include polybutylene terephthalate. In one embodiment the depot polymer is selected from the group consisting of polyethylene glycol, dextran, polylactic acid, polyglycolic acid and a copolymer of lactic acid and glycolic acid, and in one specific embodiment the depot polymer is polyethylene glycol. In one embodiment the depot polymer is polyethylene glycol and the combined molecular weight of depot polymer(s) linked to the dipeptide element is about 40,000 to 80,000 Daltons.

[0445] In accordance with one embodiment a self-cleaving dipeptide element is provided, comprising the structure U-J, wherein U is an amino acid or a hydroxyl acid and J is an N-alkylated amino acid. In one embodiment one or more dipeptide elements are linked to the incretin-insulin conjugate through an amide bond formed through one or more amino groups selected from the N-terminal amino group of the B chain of the insulin component, the N-terminus of the incretin peptide component, or the side chain amino group of an amino acid present in the conjugate. In accordance with one embodiment one or more dipeptide elements are linked to the incretin-insulin conjugate at an amino group selected from the N-terminal amino group of the conjugate, or the side chain amino group of an aromatic amine of a 4-amino-phenylalanine residue present at a position corresponding to position A19, B16 or B25 of native insulin, or a side chain of an amino acid of the linking moiety of a single chain insulin analog, or the N-terminus of the incretin peptide or insulin peptide components of the conjugate.

[0446] In one embodiment the dipeptide prodrug element comprises the general structure of Formula X:

[chemical structure]

wherein

[0447] R₁, R₂, R₄ and R₈ are independently selected from the group consisting of H, C₁-C₁₈ alkyl, C₂-C₁₈ alkenyl, (C₁-C₁₈ alkyl)OH, (C₁-C₁₈ alkyl)SH, (C₂-C₃ alkyl)SCH₃, (C₁-C₄ alkyl)CONH₂, (C₁-C₄ alkyl)COOH, (C₁-C₄ alkyl)NH₂, (C₁-C₄ alkyl)NHC(NH₂⁺)NH₂, (C₀-C₄ alkyl)(C₃-C₆ cycloalkyl), (C₀-C₄ alkyl)(C₂-C₅ heterocyclic), (C₀-C₄ alkyl)(C₆-C₁₀ aryl)R₇, (C₁-C₄ alkyl)(C₃-C₉ heteroaryl), and C₁-C₁₂ alkyl(W)C₁-C₁₂ alkyl, wherein W is a heteroatom selected from the group consisting of N, S and O, or R₁ and R₂ together with the atoms to which they are attached form a C₃-C₁₂ cycloalkyl or aryl; or R₄ and R₈ together with the atoms to which they are attached form a C₃-C₆ cycloalkyl;

[0448] R₃ is selected from the group consisting of C₁-C₁₈ alkyl, (C₁-C₁₈ alkyl)OH, (C₁-C₁₈ alkyl)NH₂, (C₁-C₁₈ alkyl)SH, (C₀-C₄ alkyl)(C₃-C₆)cycloalkyl, (C₀-C₄ alkyl)(C₂-C₅ heterocyclic), (C₀-C₄ alkyl)(C₆-C₁₀ aryl)R₇, and (C₁-C₄ alkyl)(C₃-C₉ heteroaryl) or R₄ and R₃ together with the atoms to which they are attached form a 4, 5 or 6 member heterocyclic ring;

[0449] R₅ is NHR₆ or OH;

[0450] R₆ is H, C₁-C₈ alkyl or R₆ and R₂ together with the atoms to which they are attached form a 4, 5 or 6 member heterocyclic ring; and

[0451] R₇ is selected from the group consisting of H and OH. In one embodiment when the prodrug element is linked to the N-terminal amine of the incretin-insulin conjugate and R₄ and R₃ together with the atoms to which they are attached form a 4, 5 or 6 member heterocyclic ring, then at least one of R₁ and R₂ are other than H.

[0452] In accordance with one embodiment an increlin/insulin conjugate prodrug is provided comprising the structure: A-B-C-Q;
[0453] wherein Q is an increlin/insulin conjugate as disclosed herein;
[0454] A is an amino acid or hydroxyl acid comprising a side chain, optionally (C₁-C₈ alkyl)NH₂, wherein the side chain of A is covalently linked to a moiety that irreversibly binds a mammalian plasma protein, including for example, mammalian serum albumin. In one embodiment the side chain of A is covalently linked to an acyl or alkyl group, including a fatty acid, cholic acid, bile salts or steroid moiety of a bile acid, that is preferably at least 18, 19, 20, 21 or 22 carbons in length. In one embodiment the side chain of A is covalently linked to a C₁₆-C₃₀ acyl group or a C₁₆-C₃₀ alkyl group;
[0455] B is an N-alkylated amino acid; and
[0456] C is an amide bond, X₇₀ or X₇₀X₇₁, wherein X₇₀ and X₇₁ are amino acids independently selected from the group consisting of glycine, aspartic acid, glutamic acid, cysteic acid, homocysteic acid, homoglutamic acid, arginine, lysine and histidine, wherein A-B-C is linked to Q through an amide bond via an aliphatic amino group of Q.

[0457] Optionally, the linkage between the side chain of A and the acyl or alkyl group is via a spacer, wherein the spacer comprises one or two charged amino acids. In accordance with one embodiment the structure A-B-C is linked to Q through an amide bond linkage at an aliphatic amino group selected from the alpha amino group on the N-terminal amino acid of the incretin peptide, the A chain or the B chain, or an aliphatic amino group on a side chain of an B3, B28 or B29 amino acid of the insulin peptide. In accordance with one embodiment B is an amino acid N-alkylated with C₁-C₁₈ alkyl, C₃-C₁₈ alkenyl, (C₀-C₄ alkyl)(C₄-C₆ cycloalkyl), (C₀-C₄ alkyl)(C₃-C₅ heterocyclic), or (C₀-C₄ alkyl)(C₆-C₁₀ aryl).

[0458] In another embodiment A-B-C comprises a structure of:

[chemical structure]

wherein
[0459] R₁ is (C₁-C₆ alkyl)NH—R₉ or (C₁-C₆ alkyl)NH—S₁—R₉;
[0460] R₂ is H or C₁-C₆ alkyl;
[0461] R₃ is selected from the group consisting of C₂-C₄ alkyl, C₃-C₈ alkenyl, (C₀-C₄ alkyl)(C₄-C₆ cycloalkyl), (C₀-C₄ alkyl)(C₃-C₅ heterocyclic), (C₀-C₄ alkyl)(C₆-C₁₀ aryl) and (C₁-C₄ alkyl)(C₆-C₁₀ heteroaryl), or R₄ and R₃ together with the atoms to which they are attached form a 4, 5 or 6 member heterocyclic ring;
[0462] R₄, and R₈ are independently selected from the group consisting of H, C₁-C₁₈ alkyl, C₂-C₁₈ alkenyl, (C₁-C₁₈ alkyl)OH, (C₁-C₁₈ alkyl)SH, (C₂-C₃ alkyl)SCH₃, (C₁-C₄ alkyl)CONH₂, (C₁-C₄ alkyl)COOH, (C₁-C₄ alkyl)NH₂, (C₁-C₄ alkyl)NHC(NH₂⁺)NH₂, (C₀-C₄ alkyl)(C₃-C₆ cycloalkyl), (C₀-C₄ alkyl)(C₂-C₅ heterocyclic), (C₀-C₄ alkyl)(C₆-C₁₀ aryl)R₇, (C₁-C₄ alkyl)(C₃-C₉ heteroaryl), and C₁-C₁₂ alkyl(W₁)C₁-C₁₂ alkyl, wherein W₁ is a heteroatom selected from the group consisting of N, S and O, or R₄ and R₈ together with the atoms to which they are attached form a C₃-C₆ cycloalkyl;
[0463] R₅ is NHR₆ or OH;
[0464] R₆ is H, or C₁-C₈ alkyl;
[0465] R₇ is selected from the group consisting of H, OH, C₁-C₁₈ alkyl, C₂-C₁₈ alkenyl, (C₀-C₄ alkyl)NH₂, and (C₀-C₄ alkyl)OH;
[0466] R₉ is selected from the group consisting of C₁₈-C₃₀ acyl;
[0467] R₁₀, R₁₁, R₁₂, and R₁₃ are independently selected from the group consisting of H, CH₂, CHOH, CH₂SH, (C₁-C₄ alkyl)COOH, (C₁-C₄ alkyl)NH₂, (C₁-C₄ alkyl)NHC(NH₂⁺)NH₂ and CH₂(C₃—N₂ heterocyclic); and
[0468] S₁ is a spacer consisting of one or two charged amino acids selected from the group consisting of aspartic acid, glutamic acid, cysteic acid, homocysteic acid, homoglutamic acid, arginine, lysine and histidine, wherein A-B-C is linked to Q through an amide bond via an aliphatic amino group of Q. In one embodiment R₁ is (C₁-C₆ alkyl)NH—S₁—R₉; R₃ is selected from the group consisting of C₂-C₄ alkyl; R₂, R₄, R₁₁, and R₁₃ are each H; R₅ is NH₂; R₈ is H or C₁-C₈ alkyl; R₉ is C₁₈-C₃₀ acyl; R₁₀ and R₁₂ are independently selected from the group consisting of (C₁-C₄ alkyl)COOH, (C₁-C₄ alkyl)NH₂ and (C₁-C₄ alkyl)NHC(NH₂⁺)NH₂; and S₁ is a spacer comprising one or two charged amino acids selected from the group consisting of aspartic acid, glutamic acid, cysteic acid, homocysteic acid, homoglutamic acid, arginine, lysine and histidine.
[0469] In a further embodiment the peptide prodrug element A-B-C as disclosed in the immediate above paragraphs are further modified to prevent cleavage of the peptide prodrug element during storage and prior to administration to a patient. In one embodiment the N-terminal amine of the peptide prodrug element is linked to a moiety that remains bound to the N-terminus until administration to the patient. In one embodiment, the insulin prodrug of the formula A-B-C-Q further comprises a serum enzyme cleavable moiety linked to A via the N-terminal amine of A. In one embodiment the enzyme cleavable moiety is a peptide that is cleaved by dipeptidyl peptidase IV (DPP-IV), including for example a dipeptide of Arg-Pro, Lys-Pro or Glu-Pro.

### Glucagon Related Peptides

[0470] Applicants have discovered analogs of glucagon that have altered activities at the glucagon, GLP1 and GIP receptors. Any of these analogs (referred to generally as incretins) can be used as the glucagon related peptide in the conjugates described herein. More particularly the glucagon related peptide can be any of the class 1, class 2 or class 3 glucagon peptides described herein.

[0471] Class 1 Glucagon Related Peptides

[0472] In certain embodiments, the glucagon related peptide is a Class 1 glucagon related peptide, which is described herein and in International Patent Application No. PCT US2009/47437 (filed on Jun. 16, 2009) and International Patent Application Publication No. WO 2008/086086, published on Jul. 17, 2008, the contents of which are incorporated by reference in their entirety.

[0473] The biological sequences referenced in the following section (SEQ ID NOs: 801-915) relating to Class 1 glucagon related peptides correspond to SEQ ID NOs: 1-115 in International Patent Application No. PCT US2009/47437.

### Activity

[0474] Class 1 glucagon related peptides retain glucagon receptor activity relative to the native glucagon peptide (SEQ ID NO: 801). For example, the glucagon related peptide can retain at least 10%, 20%, 30%, 40%, 50%, 60%, 70%, 75% activity, 80% activity, 85% activity, or 90% of the activity of native glucagon (calculated as the inverse ratio of EC50s for the glucagon related peptide vs. glucagon, e.g., as measured by cAMP production using the assay generally described in Example 7). In some embodiments, the Class 1 glucagon related peptides have the same or greater activity (used synonymously with the term “potency” herein) than glucagon. In some embodiments, the glucagon related peptides described herein exhibit no more than about 100%, 1000%, 10,000%, 100,000%, or 1,000,000% of the activity of native glucagon peptide.

### Improved Solubility

[0475] Native glucagon exhibits poor solubility in aqueous solution, particularly at physiological pH, with a tendency to aggregate and precipitate over time. In contrast, the Class 1 glucagon related peptides in some embodiments exhibit at least 2-fold, 5-fold, or even higher solubility compared to native glucagon at a pH between 6 and 8, or between 6 and 9, for example, at pH 7 after 24 hours at 25° C.

[0476] Accordingly, in some embodiments, a Class 1 glucagon related peptide has been modified relative to the wild type peptide of His-Ser-Gln-Gly-Thr-Phe-Thr-Ser-Asp-Tyr-Ser-Lys-Tyr-Leu-Asp-Ser-Arg-Arg-Ala-Gln-Asp-Phe-Val-Gln-Trp-Leu-Met-Asn-Thr (SEQ ID NO: 801) to improve the peptide's solubility in aqueous solutions, particularly at a pH ranging from about 5.5 to about 8.0, while retaining the native peptide's biological activity.

[0477] For example, the solubility of any of the Class 1 glucagon related peptides described herein can be further improved by attaching a hydrophilic moiety to the peptide. Introduction of such groups also increases duration of action, e.g. as measured by a prolonged half-life in circulation. Hydrophilic moieties are further described herein.

Modification with Charged Residues

[0478] In some embodiments, solubility is improved by adding charge to the Class 1 glucagon related peptide by the substitution of native non-charged amino acids with charged amino acids selected from the group consisting of lysine, arginine, histidine, aspartic acid and glutamic acid, or by the addition of charged amino acids to the amino or carboxy terminus of the peptide.

[0479] In accordance with some embodiments, the Class 1 glucagon related peptide has improved solubility due to the fact that the peptide is modified by amino acid substitutions and/or additions that introduce a charged amino acid into the C-terminal portion of the peptide, and in some embodiments at a position C-terminal to position 27 of SEQ ID NO: 801. Optionally, one, two or three charged amino acids may be introduced within the C-terminal portion, and in some embodiments C-terminal to position 27. In accordance with some embodiments, the native amino acid(s) at positions 28 and/or 29 are substituted with a charged amino acid, and/or one to three charged amino acids are added to the C-terminus of the peptide, e.g. after position 27, 28 or 29. In exemplary embodiments, one, two, three or all of the charged amino acids are negatively charged. In other embodiments, one, two, three or all of the charged amino acids are positively charged.

[0480] In specific exemplary embodiments, the Class 1 glucagon related peptide may comprise any one or two of the following modifications: substitution of N28 with E; substitution of N28 with D; substitution of T29 with D; substitution of T29 with E; insertion of E after position 27, 28 or 29; insertion of D after position 27, 28 or 29. For example, D28E29, E28E29, E29E30, E28E30, D28E30.

[0481] In accordance with one exemplary embodiment, the Class 1 glucagon related peptide comprises an amino acid sequence of SEQ ID NO: 811, or an analog thereof that contains 1 to 3 further amino acid modifications (described herein in reference to glucagon agonists) relative to native glucagon, or a glucagon agonist analog thereof. SEQ ID NO: 811 represents a modified Class 1 glucagon related peptide, wherein the asparagine residue at position 28 of the native protein has been substituted with an aspartic acid. In another exemplary embodiment the Class 1 glucagon related peptide comprises an amino acid sequence of SEQ ID NO: 838, wherein the asparagine residue at position 28 of the native protein has been substituted with glutamic acid. Other exemplary embodiments include Class 1 glucagon related peptides of SEQ ID NOS: 824, 825, 826, 833, 835, 836 and 837.

### Improved Stability

[0482] Any of the Class 1 glucagon related peptides may additionally exhibit improved stability and/or reduced degradation, for example, retaining at least 95% of the original peptide after 24 hours at 25° C. The Class 1 glucagon related peptides may include additional modifications that alter its pharmaceutical properties, e.g. increased potency, prolonged half-life in circulation, increased shelf-life, reduced precipitation or aggregation, and/or reduced degradation, e.g., reduced occurrence of cleavage or chemical modification after storage.

[0483] In yet further exemplary embodiments, any of the foregoing Class 1 glucagon related peptides can be further modified to improve stability by modifying the amino acid at position 15 of SEQ ID NO: 801 to reduce degradation of the peptide over time, especially in acidic or alkaline buffers. In exemplary embodiments, Asp at position 15 is substituted with a Glu, homo-Glu, cysteic acid, or homo-cysteic acid.

[0484] Alternatively, any of the Class 1 glucagon related peptides described herein can be further modified to improve stability by modifying the amino acid at position 16 of SEQ ID NO: 801. In exemplary embodiments, Ser at position 16 is substituted with Thr or AIB, or any of the amino acids substitutions described herein with regard to Class 1 glucagon related peptides which enhance potency at the glucagon receptor. Such modifications reduce cleavage of the peptide bond between Asp15-Ser16.

[0485] In some embodiments, any of the Class 1 glucagon related peptides described herein can be further modified to reduce degradation at various amino acid positions by modifying any one, two, three, or all four of positions 20, 21, 24, or 27. Exemplary embodiments include substitution of Gln at position 20 with Ser, Thr, Ala or AIB, substitution of Asp at position 21 with Glu, substitution of Gln at position 24 with Ala or AIB, substitution of Met at position 27 with Leu or Nle. Removal or substitution of methionine reduces degradation due to oxidation of the methionine. Removal or substitution of Gln or Asn reduces degradation due to deamidation of Gln or Asn. Removal or substitution of Asp reduces degradation that occurs through dehydration of Asp to form a cyclic succinimide intermediate followed by isomerization to iso-aspartate.

### Enhanced Potency

[0486] In accordance with another embodiment, Class 1 glucagon related peptides are provided that have enhanced potency at the glucagon receptor, wherein the peptides comprise an amino acid modification at position 16 of native glucagon (SEQ ID NO: 801). By way of nonlimiting example, such enhanced potency can be provided by substituting the naturally occurring serine at position 16 with glutamic acid or with another negatively charged amino acid having a side chain with a length of 4 atoms, or alternatively with any one of glutamine, homoglutamic acid, or homocysteic acid, or a charged amino acid having a side chain containing at least one heteroatom, (e.g. N, O, S, P) and with a side chain length of about 4 (or 3-5) atoms. Substitution of serine at position 16 with glutamic acid enhances glucagon activity at least 2-fold, 4-fold, 5-fold and up to 10-fold greater at the glucagon receptor. In some embodiments, the Class 1 glucagon related peptide retains selectivity for the glucagon receptor relative to the GLP-1 receptors, e.g., at least 5-fold, 10-fold, or 15-fold selectivity.

### DPP-IV Resistance

[0487] In some embodiments, the Class 1 glucagon related peptides disclosed herein are further modified at position 1 or 2 to reduce susceptibility to cleavage by dipeptidyl peptidase IV. More particularly, in some embodiments, position 1 and/or position 2 of the Class 1 glucagon related peptide is substituted with the DPP-IV resistant amino acid(s) described herein. In some embodiments, position 2 of the analog peptide is substituted with an aminoisobutyric acid. In some embodiments, position 2 of the analog peptide is substituted with an amino acid selected from the group consisting of D-serine, D-alanine, glycine, N-methyl serine, and ε-amino butyric acid. In another embodiment, position 2 of the Class 1 glucagon related peptide is substituted with an amino acid selected from the group consisting of D-serine, glycine, and aminoisobutyric acid. In some embodiments, the amino acid at position 2 is not D-serine.

Reduction in glucagon activity upon modification of the amino acids at position 1 and/or position 2 of the glucagon related peptide can be restored by stabilization of the alpha-helix structure in the C-terminal portion of the glucagon related peptide (around amino acids 12-29). The alpha helix structure can be stabilized by, e.g., formation of a covalent or non-covalent intramolecular bridge (e.g., a lactam bridge between side chains of amino acids at positions “i” and “i+4”, wherein i is an integer from 12 to 25), substitution and/or insertion of amino acids around positions 12-29 with an alpha helix-stabilizing amino acid (e.g., an α,α-disubstituted amino acid), as further described herein.

### Modifications at Position 3

[0488] Glucagon receptor activity can be reduced by an amino acid modification at position 3 (according to the amino acid numbering of wild type glucagon), e.g. substitution of the naturally occurring glutamine at position 3, with an acidic, basic, or a hydrophobic amino acid. For example substitution at position 3 with glutamic acid, ornithine, or norleucine substantially reduces or destroys glucagon receptor activity.

[0489] Maintained or enhanced activity at the glucagon receptor may be achieved by modifying the Gln at position 3 with a glutamine analog as described herein. For example, glucagon agonists can comprise the amino acid sequence of SEQ ID NO: 863, SEQ ID NO: 869, SEQ ID NO: 870, SEQ ID NO: 871, SEQ ID NO: 872, SEQ ID NO: 873 and SEQ ID NO: 874.

Enhancing GLP-1 Activity with C-Terminal Amides and Esters

[0490] Enhanced activity at the GLP-1 receptor is provided by replacing the carboxylic acid of the C-terminal amino acid with a charge-neutral group, such as an amide or ester. Conversely, retaining the native carboxylic acid at the C-terminus of the peptide maintains the relatively greater selectivity of the Class 1 glucagon related peptide for the glucagon receptor vs. the GLP-1 receptor (e.g., greater than about 5, 6, 7, 8, 9, 10, 11, 12, 13, 14, 15, 16, 17, 18, 19, or 20-fold).

### Further Modifications and Combinations

[0491] Additional modifications may be made to the Class 1 glucagon related peptide which may further increase solubility and/or stability and/or glucagon activity. The Class 1 glucagon related peptide may alternatively comprise other modifications that do not substantially affect solubility or stability, and that do not substantially decrease glucagon activity. In exemplary embodiments, the Class 1 glucagon related peptide may comprise a total of up to 11, or up to 12, or up to 13, or up to 14 amino acid modifications relative to the native glucagon sequence. For example, conservative or non-conservative substitutions, additions or deletions may be carried out at any of positions 2, 5, 7, 10, 11, 12, 13, 14, 17, 18, 19, 20, 21, 24, 27, 28 or 29.

### Exemplary Modifications of the Class 1 Glucagon Related Peptide Include but are not Limited to:

[0492] (a) non-conservative substitutions, conservative substitutions, additions or deletions while retaining at least partial glucagon agonist activity, for example, conservative substitutions at one or more of positions 2, 5, 7, 10, 11, 12, 13, 14, 16, 17, 18, 19, 20, 21, 24, 27, 28 or 29, substitution of Tyr at position 10 with Val or Phe, substitution of Lys at position 12 with Arg, substitution of one or more of these positions with Ala;

[0493] (b) deletion of amino acids at positions 29 and/or 28, and optionally position 27, while retaining at least partial glucagon agonist activity;

[0494] (c) modification of the aspartic acid at position 15, for example, by substitution with glutamic acid, homoglutamic acid, cysteic acid or homocysteic acid, which may reduce degradation; or modification of the serine at position 16, for example, by substitution of threonine, AIB, glutamic acid or with another negatively charged amino acid having a side chain with a length of 4 atoms, or alternatively with any one of glutamine, homoglutamic acid, or homocysteic acid, which likewise may reduce degradation due to cleavage of the Asp15-Ser16 bond;

[0495] (d) addition of a hydrophilic moiety such as the water soluble polymer polyethylene glycol, as described herein, e.g. at position 16, 17, 20, 21, 24, 29, 40 or at the C-terminal amino acid, which may increase solubility and/or half-life;

[0496] (e) modification of the methionine at position 27, for example, by substitution with leucine or norleucine, to reduce oxidative degradation;

[0497] (f) modification of the Gln at position 20 or 24, e.g. by substitution with Ser, Thr, Ala or AIB, to reduce degradation that occurs through deamidation of Gln

[0498] (g) modification of Asp at position 21, e.g. by substitution with Glu, to reduce degradation that occurs through dehydration of Asp to form a cyclic succinimide intermediate followed by isomerization to iso-aspartate;

[0499] (h) modifications at position 1 or 2 as described herein that improve resistance to DPP-IV cleavage, optionally in combination with an intramolecular bridge such as a lactam bridge between positions “i” and “i+4”, wherein i is an integer from 12 to 25, e.g., 12, 16, 20, 24;

[0500] (i) acylating or alkylating the glucagon related peptide as described herein, which may increase the activity at the glucagon receptor and/or the GLP-1 receptor, increase half-life in circulation and/or extending the duration of action and/or delaying the onset of action, optionally combined with addition of a hydrophilic moiety, additionally or alternatively, optionally combined with a modification which selectively reduces activity at the GLP-1 peptide, e.g., a modification of the Thr at position 7, such as a substitution of the Thr at position 7 with an amino acid lacking a hydroxyl group, e.g., Abu or Ile; deleting amino acids C-terminal to the amino acid at position 27 (e.g., deleting one or both of the amino acids at positions 28 and 29, yielding a peptide 27 or 28 amino acids in length);

[0501] (j) C-terminal extensions as described herein;

[0502] (k) homodimerization or heterodimerization as described herein; and combinations of the (a) through (k).

[0503] In some embodiments, exemplary modifications of the Class 1 glucagon related peptide include at least one amino acid modification selected from Group A and one or more amino acid modifications selected from Group B and/or Group C, wherein Group A is:

[0504] substitution of Asn at position 28 with a charged amino acid;

[0505] substitution of Asn at position 28 with a charged amino acid selected from the group consisting of Lys, Arg, His, Asp, Glu, cysteic acid, and homocysteic acid;

[0506] substitution at position 28 with Asn, Asp, or Glu;

[0507] substitution at position 28 with Asp;

[0508] substitution at position 28 with Glu;

[0509] substitution of Thr at position 29 with a charged amino acid;

[0510] substitution of Thr at position 29 with a charged amino acid selected from the group consisting of Lys, Arg, His, Asp, Glu, cysteic acid, and homocysteic acid;

[0511] substitution at position 29 with Asp, Glu, or Lys;

[0512] substitution at position 29 with Glu;

[0513] insertion of 1-3 charged amino acids after position 29;

[0514] insertion after position 29 of Glu or Lys;

[0515] insertion after position 29 of Gly-Lys or Lys-Lys;

[0516] or combinations thereof;

wherein Group B is:

[0517] substitution of Asp at position 15 with Glu;

[0518] substitution of Ser at position 16 with Thr or AIB;

and wherein Group C is:

[0519] substitution of His at position 1 with a non-native amino acid that reduces susceptibility of the glucagon related peptide to cleavage by dipeptidyl peptidase IV (DPP-IV),

[0520] substitution of Ser at position 2 with a non-native amino acid that reduces susceptibility of the glucagon related peptide to cleavage by dipeptidyl peptidase IV (DPP-IV),

[0521] substitution of Lys at position 12 with Arg;

[0522] substitution of Gln at position 20 with Ser, Thr, Ala or AIB;

[0523] substitution of Asp at position 21 with Glu;

[0524] substitution of Gln at position 24 with Ser, Thr, Ala or AIB;

[0525] substitution of Met at position 27 with Leu or Nle;

[0526] deletion of amino acids at positions 27-29;

[0527] deletion of amino acids at positions 28-29;

[0528] deletion of the amino acid at positions 29;

[0529] or combinations thereof.

[0530] In exemplary embodiments, Lys at position 12 is substituted with Arg. In other exemplary embodiments amino acids at positions 29 and/or 28, and optionally at position 27, are deleted.

[0531] In some specific embodiments, the glucagon related peptide comprises (a) an amino acid modification at position 1 and/or 2 that confers DPP-IV resistance, e.g., substitution with DMIA at position 1, or AIB at position 2, (b) an intramolecular bridge within positions 12-29, e.g. at positions 16 and 20, or one or more substitutions of the amino acids at positions 16, 20, 21, and 24 with an α,α disubstituted amino acid, optionally (c) linked to a hydrophilic moiety such as PEG, e.g., through Cys at position 24, 29 or at the C-terminal amino acid, optionally (d) an amino acid modification at position 27 that substitutes Met with, e.g., Nle, optionally (e) amino acid modifications at positions 20, 21 and 24 that reduce degradation, and optionally (f) linked to SEQ ID NO: 820. When the glucagon related peptide is linked to SEQ ID NO: 820, the amino acid at position 29 in certain embodiments is Thr or Gly. In other specific embodiments, the glucagon related peptide comprises (a) Asp28Glu29, or Glu28Glu29, or Glu29Glu30, or Glu28Glu30 or Asp28Glu30, and optionally (b) an amino acid modification at position 16 that substitutes Ser with, e.g. Thr or AIB, and optionally (c) an amino acid modification at position 27 that substitutes Met with, e.g., Nle, and optionally (d) amino acid modifications at positions 20, 21 and 24 that reduce degradation. In a specific embodiment, the glucagon related peptide is T16, A20, E21, A24, Nle27, D28, E29.

[0532] In some embodiments, the Class 1 glucagon related peptide comprises the amino acid sequence: X1-X2-Gln-Gly-Thr-Phe-Thr-Ser-Asp-Tyr-Ser-Lys-Tyr-Leu-Asp-Ser-Arg-Arg-Ala-Gln-Asp-Phe-Val-Gln-Trp-Leu-Met-Z₁ (SEQ ID NO: 839) with 1 to 3 amino acid modifications thereto,

wherein X₁ and/or X₂ is a non-native amino acid that reduces susceptibility of (or increases resistance of) the glucagon related peptide to cleavage by dipeptidyl peptidase IV (DPP-IV), wherein Z₁ is selected from the group consisting of —COOH (the naturally occurring C-terminal carboxylate), -Asn-COOH, Asn-Thr-COOH, and Y—COOH, wherein Y is 1 to 2 amino acids, and wherein an intramolecular bridge, preferably a covalent bond, connects the side chains of an amino acid at position i and an amino acid at position i+4, wherein i is 12, 16, 20 or 24.

[0533] In some embodiments, the intramolecular bridge is a lactam bridge. In some embodiments, the amino acids at positions i and i+4 of SEQ ID NO: 839 are Lys and Glu, e.g., Glu16 and Lys20. In some embodiments, X₁ is selected from the group consisting of: D-His, N-methyl-His, alpha-methyl-His, imidazole acetic acid, des-amino-His, hydroxyl-His, acetyl-His, homo-His, and alpha, alpha-dimethyl imidiazole acetic acid (DMIA). In other embodiments, X₂ is selected from the group consisting of: D-Ser, D-Ala, Gly, N-methyl-Ser, Val, and alpha, aminoisobutyric acid (AIB). In some embodiments, the glucagon related peptide is covalently linked to a hydrophilic moiety at any of amino acid positions 16, 17, 20, 21, 24, 29, 40, within a C-terminal extension, or at the C-terminal amino acid. In exemplary embodiments, this hydrophilic moiety is covalently linked to a Lys, Cys, Orn, homocysteine, or acetyl-phenylalanine residue at any of these positions. Exemplary hydrophilic moieties include polyethylene glycol (PEG), for example, of a molecular weight of about 1,000 Daltons to about 40,000 Daltons, or about 20,000 Daltons to about 40,000 Daltons.

[0534] In other embodiments, the Class I glucagon related peptide comprises the amino acid sequence: X₁-X₂-Gln-Gly-Thr-Phe-Thr-Ser-Asp-Tyr-Ser-Lys-Tyr-Leu-Asp-Ser-Arg-Arg-Ala-Gln-Asp-Phe-Val-Gln-Trp-Leu-Met-Z₁ (SEQ ID NO: 839), wherein X₁ and/or X₂ is a non-native amino acid that reduces susceptibility of (or increases resistance of) the glucagon related peptide to cleavage by dipeptidyl peptidase IV (DPP-IV), wherein one, two, three, four or more of positions 16, 20, 21, and 24 of the glucagon related peptide is substituted with an α, α-disubstituted amino acid, and wherein Z₁ is selected from the group consisting of —COOH (the naturally occurring C-terminal carboxylate), -Asn-COOH, Asn-Thr-COOH, and Y—COOH, wherein Y is 1 to 2 amino acids.

[0535] Exemplary further amino acid modifications to the foregoing Class 1 glucagon related peptides or analogs include substitution of Thr at position 7 with an amino acid lacking a hydroxyl group, e.g., aminobutyric acid (Abu), Ile, optionally, in combination with substitution or addition of an amino acid comprising a side chain covalently attached (optionally, through a spacer) to an acyl or alkyl group, which acyl or alkyl group is non-native to a naturally-occurring amino acid, substitution of Lys at position 12 with Arg; substitution of Asp at position 15 with Glu; substitution of Ser at position 16 with Thr or AIB; substitution of Gln at position 20 with Ser, Thr, Ala or AIB; substitution of Asp at position 21 with Glu; substitution of Gln at position 24 with Ser, Thr, Ala or AIB; substitution of Met at position 27 with Leu or Nle; substitution of Asn at position 28 with a charged amino acid; substitution of Asn at position 28 with a charged amino acid selected from the group consisting of Lys, Arg, His, Asp, Glu, cysteic acid, and homocysteic acid; substitution at position 28 with Asn, Asp, or Glu; substitution at position 28 with Asp; substitution at position 28 with Glu; substitution of Thr at position 29 with a charged amino acid; substitution of Thr at position 29 with a charged amino acid selected from the group consisting of Lys, Arg, His, Asp, Glu, cysteic acid, and homocysteic acid; substitution at position 29 with Asp, Glu, or Lys; substitution at position 29 with Glu; insertion of 1-3 charged amino acids after position 29; insertion at position 30 (i.e., after position 29) of Glu or Lys; optionally with insertion at position 31 of Lys; addition of SEQ ID NO: 820 to the C-terminus, optionally, wherein the amino acid at position 29 is Thr or Gly; substitution or addition of an amino acid covalently attached to a hydrophilic moiety; or a combination thereof.

[0536] Any of the modifications described above in reference to Class 1 glucagon agonists which increase glucagon receptor activity, retain partial glucagon receptor activity, improve solubility, increase stability, or reduce degradation can be applied to Class 1 glucagon related peptides individually or in combination.

### Examples of Embodiments of Class 1 Glucagon Related Peptides

[0537] In accordance with some embodiments the native glucagon peptide of SEQ ID NO: 801 is modified by the substitution of the native amino acid at position 28 and/or 29 with a negatively charged amino acid (e.g., aspartic acid or glutamic acid) and optionally the addition of a negatively charged amino acid (e.g., aspartic acid or glutamic acid) to the carboxy terminus of the peptide. In an alternative embodiment the native glucagon peptide of SEQ ID NO: 801 is modified by the substitution of the native amino acid at position 29 with a positively charged amino acid (e.g., lysine, arginine or histidine) and optionally the addition of one or two positively charged amino acid (e.g., lysine, arginine or histidine) on the carboxy terminus of the peptide. In accordance with some embodiments a glucagon analog having improved solubility and stability is provided wherein the analog comprises the amino acid sequence of SEQ ID NO: 834 with the proviso that at least one amino acids at position, 28, or 29 is substituted with an acidic amino acid and/or an additional acidic amino acid is added at the carboxy terminus of SEQ ID NO: 834. In some embodiments the acidic amino acids are independently selected from the group consisting of Asp, Glu, cysteic acid and homocysteic acid.

[0538] In accordance with some embodiments a glucagon agonist having improved solubility and stability is provided wherein the agonist comprises the amino acid sequence of SEQ ID NO: 833, wherein at least one of the amino acids at positions 27, 28 or 29 is substituted with a non-native amino acid residue (i.e. at least one amino acid present at position 27, 28 or 29 of the analog is an acid amino acid different from the amino acid present at the corresponding position in SEQ ID NO: 801). In accordance with some embodiments a glucagon agonist is provided comprising the sequence of SEQ ID NO: 833 with the proviso that when the amino acid at position 28 is asparagine and the amino acid at position 29 is threonine, the peptide further comprises one to two amino acids, independently selected from the group consisting of Lys, Arg, His, Asp or Glu, added to the carboxy terminus of the glucagon related peptide. In accordance with some embodiments the methionine residue present at position 27 of the native peptide is changed to leucine or norleucine to prevent oxidative degradation of the peptide.

[0539] In some embodiments a glucagon analog of SEQ ID NO: 833 is provided wherein 1 to 6 amino acids, selected from positions 1, 2, 5, 7, 10, 11, 12, 13, 14, 16, 17, 18, 19, 20, 21 or 24 of the analog differ from the corresponding amino acid of SEQ ID NO: 801. In accordance with another embodiment a glucagon analog of SEQ ID NO: 833 is provided wherein 1 to 3 amino acids selected from positions 1, 2, 5, 7, 10, 11, 12, 13, 14, 16, 17, 18, 19, 20, 21 or 24 of the analog differ from the corresponding amino acid of SEQ ID NO: 801. In another embodiment, a glucagon analog of SEQ ID NO: 807, SEQ ID NO: 808 or SEQ ID NO: 834 is provided wherein 1 to 2 amino acids selected from positions 1, 2, 5, 7, 10, 11, 12, 13, 14, 16, 17, 18, 19, 20, 21 or 24 of the analog differ from the corresponding amino acid of SEQ ID NO: 801, and in a further embodiment those one to two differing amino acids represent conservative amino acid substitutions relative to the amino acid present in the native sequence (SEQ ID NO: 801). In some embodiments a glucagon related peptide of SEQ ID NO: 811 or SEQ ID NO: 813 is provided wherein the glucagon related peptide further comprises one, two or three amino acid substitutions at positions selected from positions 2, 5, 7, 10, 11, 12, 13, 14, 16, 17, 18, 19, 20, 21, 24, 27 or 29. In some embodiments the substitutions at positions 2, 5, 7, 10, 11, 12, 13, 14, 16, 17, 18, 19, 20, 27 or 29 are conservative amino acid substitutions.

[0540] In some embodiments a glucagon agonist is provided comprising an analog peptide of SEQ ID NO: 801 wherein the analog differs from SEQ ID NO: 801 by having an amino acid other than serine at position 2 and by having an acidic amino acid substituted for the native amino acid at position 28 or 29 or an acidic amino acid added to the carboxy terminus of the peptide of SEQ ID NO: 801. In some embodiments the acidic amino acid is aspartic acid or glutamic acid. In some embodiments a glucagon analog of SEQ ID NO: 809, SEQ ID NO: 812, SEQ ID NO: 813 or SEQ ID NO: 832 is provided wherein the analog differs from the parent molecule by a substitution at position 2. More particularly, position 2 of the analog peptide is substituted with an amino acid selected from the group consisting of D-serine, alanine, D-alanine, glycine, n-methyl serine and aminoisobutyric acid.

[0541] In another embodiment a glucagon agonist is provided comprising an analog peptide of SEQ ID NO: 801 wherein the analog differs from SEQ ID NO: 801 by having an amino acid other than histidine at position 1 and by having an acidic amino acid substituted for the native amino acid at position 28 or 29 or an acidic amino acid added to the carboxy terminus of the peptide of SEQ ID NO: 801. In some embodiments the acidic amino acid is aspartic acid or glutamic acid. In some embodiments a glucagon analog of SEQ ID NO: 809, SEQ ID NO: 812, SEQ ID NO: 813 or SEQ ID NO: 832 is provided wherein the analog differs from the parent molecule by a substitution at position 1. More particularly, position 1 of the analog peptide is substituted with an amino acid selected from the group consisting of DMIA, D-histidine, desaminohistidine, hydroxyl-histidine, acetyl-histidine and homo-histidine.

[0542] In accordance with some embodiments the modified glucagon related peptide comprises a sequence selected from the group consisting of SEQ ID NO: 809, SEQ ID NO: 812, SEQ ID NO: 813 and SEQ ID NO: 832. In a further embodiment a glucagon related peptide is provided comprising a sequence of SEQ ID NO: 809, SEQ ID NO: 812, SEQ ID NO: 813 or SEQ ID NO: 832 further comprising one to two amino acids, added to the C-terminus of SEQ ID NO: 809, SEQ ID NO: 812, SEQ ID NO: 813 or SEQ ID NO: 832, wherein the additional amino acids are independently selected from the group consisting of Lys, Arg, His, Asp Glu, cysteic acid or homocysteic acid. In some embodiments the additional amino acids added to the carboxy terminus are selected from the group consisting of Lys, Arg, His, Asp or Glu or in a further embodiment the additional amino acids are Asp or Glu.

[0543] In another embodiment the glucagon related peptide comprises the sequence of SEQ ID NO: 7 or a glucagon agonist analog thereof. In some embodiments the peptide comprising a sequence selected from the group consisting of SEQ ID NO: 808, SEQ ID NO: 810, SEQ ID NO: 811, SEQ ID NO: 812 and SEQ ID NO: 813. In another embodiment the peptide comprising a sequence selected from the group consisting of SEQ ID NO: 808, SEQ ID NO: 810 and SEQ ID NO: 811. In some embodiments the glucagon related peptide comprises the sequence of SEQ ID NO: 808, SEQ ID NO: 810 and SEQ ID NO: 811 further comprising an additional amino acid, selected from the group consisting of Asp and Glu, added to the C-terminus of the glucagon related peptide. In some embodiments the glucagon related peptide comprises the sequence of SEQ ID NO: 811 or SEQ ID NO: 813, and in a further embodiment the glucagon related peptide comprises the sequence of SEQ ID NO: 811.

[0544] In accordance with some embodiments a glucagon agonist is provided comprising a modified glucagon related peptide selected from the group consisting of:

[0545] NH₂-His-Ser-Gln-Gly-Thr-Phe-Thr-Ser-Asp-Tyr-Ser-Lys-Tyr-Leu-Xaa-Ser-Arg-Arg-Ala-Gln-Asp-Phe-Val-Gln-Trp-Leu-Xaa-Xaa-Xaa-R (SEQ ID NO: 834),

[0546] NH₂-His-Ser-Gln-Gly-Thr-Phe-Thr-Ser-Asp-Tyr-Ser-Lys-Tyr-Leu-Asp-Ser-Arg-Arg-Ala-Gln-Asp-Phe-Val-Gln-Trp-Leu-Met-Asp-Thr-R (SEQ ID NO: 811) and

[0547] NH₂-His-Ser-Gln-Gly-Thr-Phe-Thr-Ser-Asp-Tyr-Ser-Xaa-Tyr-Leu-Glu-Ser-Arg-Arg-Ala-Gln-Asp-Phe-Val-Gln-Trp-Leu-Met-Asp-Thr-R (SEQ ID NO: 813)

[0548] wherein Xaa at position 15 is Asp, Glu, cysteic acid, homoglutamic acid or homocysteic acid, the Xaa at position 28 is Asn or an acidic amino acid and the Xaa at position 29 is Thr or an acidic amino acid and R is an acidic amino acid, COOH or CONH₂, with the proviso that an acidic acid residue is present at one of positions 28, 29 or 30. In some embodiments R is COOH, and in another embodiment R is CONH₂.

[0549] The present disclosure also encompasses glucagon fusion peptides wherein a second peptide has been fused to the C-terminus of the glucagon related peptide to enhance the stability and solubility of the glucagon related peptide. More particularly, the fusion glucagon related peptide may comprise a glucagon agonist analog comprising a glucagon related peptide NH₂-His-Ser-Gln-Gly-Thr-Phe-Thr-Ser-Asp-Tyr-Ser-Lys-Tyr-Leu-Xaa-Ser-Arg-Arg-Ala-Gln-Asp-Phe-Val-Gln-Trp-Leu-Xaa-Xaa-Xaa-R (SEQ ID NO: 834), wherein R is an acidic amino acid or a bond and an amino acid sequence of SEQ ID NO: 820 (GPSSGAPPPS), SEQ ID NO: 821 (KRNRNNIA) or SEQ ID NO: 822 (KRNR) linked to the carboxy terminal amino acid of the glucagon related peptide. In some embodiments the glucagon related peptide is selected from the group consisting of SEQ ID NO: 833, SEQ ID NO: 807 or SEQ ID NO: 808 further comprising an amino acid sequence of SEQ ID NO: 820 (GPSSGAPPPS), SEQ ID NO: 821 (KRNRNNIA) or SEQ ID NO: 822 (KRNR) linked to the carboxy terminal amino acid of the glucagon related peptide. In some embodiments the glucagon fusion peptide comprises SEQ ID NO: 802, SEQ ID NO: 803, SEQ ID NO: 804, SEQ ID NO: 805 and SEQ ID NO: 806 or a glucagon agonist analog thereof, further comprising an amino acid sequence of SEQ ID NO: 820 (GPSSGAPPPS), SEQ ID NO: 821 (KRNRNNIA) or SEQ ID NO: 822 (KRNR) linked to amino acid 29 of the glucagon related peptide. In accordance with some embodiments the fusion peptide further comprises a PEG chain linked to an amino acid at position 16, 17, 21, 24, 29, within a C-terminal extension, or at the C-terminal amino acid, wherein the PEG chain is selected from the range of 500 to 40,000 Daltons. In some embodiments the amino acid sequence of SEQ ID NO: 820 (GPSSGAPPPS), SEQ ID NO: 821 (KRNRNNIA) or SEQ ID NO: 822 (KRNR) is bound to amino acid 29 of the glucagon related peptide through a peptide bond. In some embodiments the glucagon related peptide portion of the glucagon fusion peptide comprises a sequence selected from the group consisting of SEQ ID NO: 810, SEQ ID NO: 811 and SEQ ID NO: 813. In some embodiments the glucagon related peptide portion of the glucagon fusion peptide comprises the sequence of SEQ ID NO: 811 or SEQ ID NO: 813, wherein a PEG chain is linked at position 21, 24, 29, within a C-terminal extension or at the C-terminal amino acid, respectively.

[0550] In another embodiment the glucagon related peptide sequence of the fusion peptide comprises the sequence of SEQ ID NO: 811, further comprising an amino acid sequence of SEQ ID NO: 820 (GPSSGAPPPS), SEQ ID NO: 821 (KRNRNNIA) or SEQ ID NO: 822 (KRNR) linked to amino acid 29 of the glucagon related peptide. In some embodiments the glucagon fusion peptide comprises a sequence selected from the group consisting of SEQ ID NO: 824, SEQ ID NO: 825 and SEQ ID NO: 826. Typically the fusion peptides of the present invention will have a C-terminal amino acid with the standard carboxylic acid group. However, analogs of those sequences wherein the C-terminal amino acid has an amide substituted for the carboxylic acid are also encompassed as embodiments. In accordance with some embodiments the fusion glucagon related peptide comprises a glucagon agonist analog selected from the group consisting of SEQ ID NO: 810, SEQ ID NO: 811 and SEQ ID NO: 813, further comprising an amino acid sequence of SEQ ID NO: 823 (GPSSGAPPPS-CONH₂) linked to amino acid 29 of the glucagon related peptide.

[0551] The glucagon agonists of the present invention can be further modified to improve the peptide's solubility and stability in aqueous solutions while retaining the biological activity of the glucagon related peptide. In accordance with some embodiments, introduction of hydrophilic groups at one or more positions selected from positions 16, 17, 20, 21, 24 and 29 of the peptide of SEQ ID NO: 811, or a glucagon agonist analog thereof, are anticipated to improve the solubility and stability of the pH stabilize glucagon analog. More particularly, in some embodiments the glucagon related peptide of SEQ ID NO: 810, SEQ ID NO: 811, SEQ ID NO: 813, or SEQ ID NO: 832 is modified to comprise one or more hydrophilic groups covalently linked to the side chains of amino acids present at positions 21 and 24 of the glucagon related peptide.

[0552] In accordance with some embodiments, the glucagon related peptide of SEQ ID NO: 811 is modified to contain one or more amino acid substitution at positions 16, 17, 20, 21, 24 and/or 29, wherein the native amino acid is substituted with an amino acid having a side chain suitable for crosslinking with hydrophilic moieties, including for example, PEG. The native peptide can be substituted with a naturally occurring amino acid or a synthetic (non-naturally occurring) amino acid. Synthetic or non-naturally occurring amino acids refer to amino acids that do not naturally occur in vivo but which, nevertheless, can be incorporated into the peptide structures described herein.

[0553] In some embodiments, a glucagon agonist of SEQ ID NO: 810, SEQ ID NO: 811 or SEQ ID NO: 813 is provided wherein the native glucagon peptide sequence has been modified to contain a naturally occurring or synthetic amino acid in at least one of positions 16, 17, 21, 24, 29, within a C-terminal extension or at the C-terminal amino acid of the native sequence, wherein the amino acid substitute further comprises a hydrophilic moiety. In some embodiments the substitution is at position 21 or 24, and in a further embodiment the hydrophilic moiety is a PEG chain. In some embodiments the glucagon related peptide of SEQ ID NO: 811 is substituted with at least one cysteine residue, wherein the side chain of the cysteine residue is further modified with a thiol reactive reagent, including for example, maleimido, vinyl sulfone, 2-pyridylthio, haloalkyl, and haloacyl. These thiol reactive reagents may contain carboxy, keto, hydroxyl, and ether groups as well as other hydrophilic moieties such as polyethylene glycol units. In an alternative embodiment, the native glucagon peptide is substituted with lysine, and the side chain of the substituting lysine residue is further modified using amine reactive reagents such as active esters (succinimido, anhydride, etc) of carboxylic acids or aldehydes of hydrophilic moieties such as polyethylene glycol. In some embodiments the glucagon related peptide is selected from the group consisting of SEQ ID NO: 814, SEQ ID NO: 815, SEQ ID NO: 816, SEQ ID NO: 817, SEQ ID NO: 818 and SEQ ID NO: 819.

[0554] In accordance with some embodiments the pegylated glucagon related peptide comprises two or more polyethylene glycol chains covalently bound to the glucagon related peptide wherein the total molecular weight of the glucagon chains is about 1,000 to about 5,000 Daltons. In some embodiments the pegylated glucagon agonist comprises a peptide of SEQ ID NO: 806, wherein a PEG chain is covalently linked to the amino acid residue at position 21 and at position 24, and wherein the combined molecular weight of the two PEG chains is about 1,000 to about 5,000 Daltons. In another embodiment the pegylated glucagon agonist comprises a peptide of SEQ ID NO: 806, wherein a PEG chain is covalently linked to the amino acid residue at position 21 and at position 24, and wherein the combined molecular weight of the two PEG chains is about 5,000 to about 20,000 Daltons.

[0555] The polyethylene glycol chain may be in the form of a straight chain or it may be branched. In accordance with some embodiments the polyethylene glycol chain has an average molecular weight selected from the range of about 500 to about 40,000 Daltons. In some embodiments the polyethylene glycol chain has a molecular weight selected from the range of about 500 to about 5,000 Daltons. In another embodiment the polyethylene glycol chain has a molecular weight of about 20,000 to about 40,000 Daltons.

[0556] Any of the glucagon related peptides described above may be further modified to include a covalent or non-covalent intramolecular bridge or an alpha helix-stabilizing amino acid within the C-terminal portion of the glucagon related peptide (amino acid positions 12-29). In accordance with some embodiments, the glucagon related peptide comprises any one or more of the modifications discussed above in addition to an amino acid substitution at positions 16, 20, 21, or 24 (or a combination thereof) with an α,α-disubstituted amino acid, e.g., AIB. In accordance with another embodiment, the glucagon related peptide comprises any one or more modifications discussed above in addition to an intramolecular bridge, e.g., a lactam, between the side chains of the amino acids at positions 16 and 20 of the glucagon related peptide.

[0557] In accordance with some embodiments, the glucagon related peptide comprises the amino acid sequence of SEQ ID NO: 877, wherein the Xaa at position 3 is an amino acid comprising a side chain of Structure I, II, or III:

[chemical structure]

[0558] wherein R¹ is C₀₋₃ alkyl or C₀₋₃ heteroalkyl; R² is NHR⁴ or C₁₋₃ alkyl; R³ is C₁₋₃ alkyl; R⁴ is H or C₁₋₃ alkyl; X is NH, O, or S; and Y is NHR⁴, SR³, or OR³. In some embodiments, X is NH or Y is NHR⁴. In some embodiments, R¹ is C₀₋₂ alkyl or C₁ heteroalkyl. In some embodiments, R² is NHR⁴ or C₁ alkyl. In some embodiments, R⁴ is H or C¹ alkyl. In exemplary embodiments an amino acid comprising a side chain of Structure I is provided wherein, R¹ is CH₂—S, X is NH, and R² is CH₃ (acetamidomethyl-cysteine, C(Acm)); R¹ is CH₂, X is NH, and R² is CH₃ (acetyldiaminobutanoic acid, Dab(Ac)); R¹ is C₀ alkyl, X is NH, R² is NHR⁴, and R⁴ is H (carbamoyldiaminopropanoic acid, Dap(urea)); or R¹ is CH₂—CH₂, X is NH, and R² is CH₃ (acetylornithine, Orn(Ac)). In exemplary embodiments an amino acid comprising a side chain of Structure II is provided, wherein R¹ is CH₂, Y is NHR⁴, and R⁴ is CH₃ (methylglutamine, Q(Me)); In exemplary embodiments an amino acid comprising a side chain of Structure III is provided wherein, R¹ is CH₂ and R⁴ is H (methionine-sulfoxide, M(O)); In specific embodiments, the amino acid at position 3 is substituted with Dab(Ac). For example, glucagon agonists can comprise the amino acid sequence of SEQ ID NO: 863, SEQ ID NO: 869, SEQ ID NO: 871, SEQ ID NO: 872, SEQ ID NO: 873 and SEQ ID NO: 874.

[0559] In certain embodiments, the glucagon related peptide is an analog of the glucagon related peptide of SEQ ID NO: 877. In specific aspects, the analog comprises any of the amino acid modifications described herein, including, but not limited to: a substitution of Asn at position 28 with a charged amino acid; a substitution of Asn at position 28 with a charged amino acid selected from the group consisting of Lys, Arg, His, Asp, Glu, cysteic acid, and homocysteic acid; a substitution at position 28 with Asn, Asp, or Glu; a substitution at position 28 with Asp; a substitution at position 28 with Glu; a substitution of Thr at position 29 with a charged amino acid; a substitution of Thr at position 29 with a charged amino acid selected from the group consisting of Lys, Arg, His, Asp, Glu, cysteic acid, and homocysteic acid; a substitution at position 29 with Asp, Glu, or Lys; a substitution at position 29 with Glu; a insertion of 1-3 charged amino acids after position 29; an insertion after position 29 of Glu or Lys; an insertion after position 29 of Gly-Lys or Lys-Lys; and a combination thereof.

[0560] In certain embodiments, the analog of the glucagon related peptide of SEQ ID NO: 877 comprises an α,α-disubstituted amino acid, such as AIB, at one, two, three, or all of positions 16, 20, 21, and 24. In certain embodiments, the analog of the glucagon related peptide of SEQ ID NO: 877 comprises one or more of the following: substitution of His at position 1 with a non-native amino acid that reduces susceptibility of the glucagon related peptide to cleavage by dipeptidyl peptidase IV (DPP-IV), substitution of Ser at position 2 with a non-native amino acid that reduces susceptibility of the glucagon related peptide to cleavage by dipeptidyl peptidase IV (DPP-IV), substitution of Thr at position 7 with an amino acid lacking a hydroxyl group, e.g., Abu or Ile; substitution of Tyr at position 10 with Phe or Val; substitution of Lys at position 12 with Arg; substitution of Asp at position 15 with Glu, substitution of Ser at position 16 with Thr or AIB; substitution of Gln at position 20 with Ala or AIB; substitution of Asp at position 21 with Glu; substitution of Gln at position 24 with Ala or AIB; substitution of Met at position 27 with Leu or Nle; deletion of amino acids at positions 27-29; deletion of amino acids at positions 28-29; deletion of the amino acid at positions 29; addition of the amino acid sequence of SEQ ID NO: 820 to the C-terminus, wherein the amino acid at position 29 is Thr or Gly, or a combination thereof.

[0561] In accordance with specific embodiments, the glucagon related peptide comprises the amino acid sequence of any of SEQ ID NOs: 862-867 and 869-874. In certain embodiments, the analog of the glucagon related peptide comprising SEQ ID NO: 877 comprises a hydrophilic moiety, e.g., PEG, covalently linked to the amino acid at any of positions 16, 17, 20, 21, 24, and 29 or at the C-terminal amino acid.

[0562] In certain embodiments, the analog of the glucagon related peptide comprising SEQ ID NO: 877 comprises an amino acid comprising a side chain covalently attached, optionally, through a spacer, to an acyl group or an alkyl group, which acyl group or alkyl group is non-native to a naturally-occurring amino acid. The acyl group in some embodiments is a C4 to C30 fatty acyl group. In other embodiments, the alkyl group is a C4 to C30 alkyl. In specific aspects, the acyl group or alkyl group is covalently attached to the side chain of the amino acid at position 10. In some embodiments, the amino acid at position 7 is Ile or Abu.

[0563] The glucagon agonist may be a peptide comprising the amino acid sequence of any of the SEQ ID NOs: 801-919, optionally with up to 1, 2, 3, 4, or 5 further modifications that retain glucagon agonist activity. In certain embodiments, the glucagon agonist comprises the amino acids of any of SEQ ID NOs: 859-919.

### Class 2 Glucagon Related Peptides

[0564] In certain embodiments, the glucagon related peptide is a Class 2 glucagon related peptide, which is described herein and in International Patent Application No. PCT US2009/47447 (filed on Jun. 16, 2009),U.S. Provisional Application No. 61/090,448, and U.S. Application No. 61/151,349, the contents of which are incorporated by reference in their entirety. The biological sequences referenced in the following section (SEQ ID NOs: 1001-1262) relating to Class 2 glucagon related peptides correspond to SEQ ID NOs: 1-262 in International Patent Application No. PCT US2009/47447.

### Activity

[0565] Native glucagon does not activate the GIP receptor, and normally has about 1% of the activity of native-GLP-1 at the GLP-1 receptor. Modifications to the native glucagon sequence described herein produce Class 2 glucagon related peptides that can exhibit potent glucagon activity equivalent to or better than the activity of native glucagon (SEQ ID NO: 1001), potent GIP activity equivalent to or better than the activity of native GIP (SEQ ID NO: 1004), and/or potent GLP-1 activity equivalent to or better than the activity of native GLP-1. In this regard, the Class 2 glucagon related peptide may be one of a glucagon/GIP co-agonist, glucagon/GIP/GLP-1 tri-agonist, GIP/GLP-1 co-agonist, or a GIP agonist glucagon related peptide, as further described herein.

[0566] In some embodiments, the Class 2 glucagon related peptides described herein exhibit an EC50 for GIP receptor activation activity of about 100 nM or less, or about 75, 50, 25, 10, 8, 6, 5, 4, 3, 2 or 1 nM or less. In some embodiments, the Class 2 glucagon related peptides exhibit an EC50 for glucagon receptor activation of about 100 nM or less, or about 75, 50, 25, 10, 8, 6, 5, 4, 3, 2 or 1 nM or less. In some embodiments, the Class 2 glucagon related peptides exhibit an EC50 for GLP-1 receptor activation of about 100 nM or less, or about 75, 50, 25, 10, 8, 6, 5, 4, 3, 2 or 1 nM or less. Receptor activation can be measured by in vitro assays measuring cAMP induction in HEK293 cells over-expressing the receptor, e.g. assaying HEK293 cells co-transfected with DNA encoding the receptor and a luciferase gene linked to cAMP responsive element as described in Example 7.

[0567] In some embodiments, Class 2 glucagon related peptides exhibit activity at both the glucagon receptor and the GIP receptor (“glucagon/GIP co-agonists”). These Class 2 glucagon related peptides have lost native glucagon's selectivity for glucagon receptor compared to GIP receptor. In some embodiments, the EC50 of the Class 2 glucagon related peptide at the GIP receptor is less than about 50-fold, 40-fold, 30-fold or 20-fold different (higher or lower) from its EC50 at the glucagon receptor. In some embodiments, the GIP potency of the Class 2 glucagon related peptide is less than about 500-, 450-, 400-, 350-, 300-, 250-, 200-, 150-, 100-, 75-, 50-, 25-, 20-, 15-, 10-, or 5-fold different (higher or lower) from its glucagon potency. In some embodiments, the ratio of the EC50 of the Class 2 glucagon related peptide at the GIP receptor divided by the EC50 of the Class 2 glucagon related peptide at the glucagon receptor is less than about 100, 75, 60, 50, 40, 30, 20, 15, 10, or 5. In some embodiments, GLP-1 activity have been significantly reduced or destroyed, e.g., by an amino acid modification at position 7, a deletion of the amino acid(s) C-terminal to the amino acid at position 27 or 28, yielding a 27- or 28-amino acid peptide, or a combination thereof.

[0568] In another aspect, Class 2 glucagon related peptides exhibit activity at the glucagon, GIP and GLP-1 receptors (“glucagon/GIP/GLP-1 tri-agonists”). These Class 2 glucagon related peptides have lost native glucagon's selectivity for the glucagon receptor compared to both the GLP-1 and GIP receptors. In some embodiments, the EC50 of the Class 2 glucagon related peptide at the GIP receptor is less than about 50-fold, 40-fold, 30-fold or 20-fold different (higher or lower) from its respective EC50s at the glucagon and GLP-1 receptors. In some embodiments, the GIP potency of the Class 2 glucagon related peptide is less than about 500-, 450-, 400-, 350-, 300-, 250-, 200-, 150-, 100-, 75-, 50-, 25-, 20-, 15-, 10-, or 5-fold different (higher or lower) from its glucagon and GLP-1 potencies. In some embodiments, the ratio of the EC50 of the tri-agonist at the GIP receptor divided by the EC50 of the tri-agonist at the GLP-1 receptor is less than about 100, 75, 60, 50, 40, 30, 20, 15, 10, or 5.

[0569] In yet another aspect, Class 2 glucagon related peptides exhibit activity at the GLP-1 and GIP receptors, but in which the glucagon activity has been significantly reduced or destroyed (“GIP/GLP-1 co-agonists”), e.g., by an amino acid modification at position 3. For example, substitution at this position with an acidic, basic, or a hydrophobic amino acid (glutamic acid, omithine, norleucine) reduces glucagon activity. In some embodiments, the EC50 of the glucagon related peptide at the GIP receptor is less than about 50-fold, 40-fold, 30-fold or 20-fold different (higher or lower) from its EC50 at the GLP-1 receptor. In some embodiments, the GIP potency of the Class 2 glucagon related peptide is less than about 25-, 20-, 15-, 10-, or 5-fold different (higher or lower) from its GLP-1 potency. In some embodiments these Class 2 glucagon related peptides have about 10% or less of the activity of native glucagon at the glucagon receptor, e.g. about 1-10%, or about 0.1-10%, or greater than about 0.1% but less than about 10%. In some embodiments, the ratio of the EC50 of the Class 2 glucagon related peptide at the GIP receptor divided by the EC50 of the Class 2 glucagon related peptide at the GLP-1 receptor is less than about 100, 75, 60, 50, 40, 30, 20, 15, 10, or 5, and no less than 1. In some embodiments, the ratio of the GIP potency of the Class 2 glucagon related peptide compared to the GLP-1 potency of the Class 2 glucagon related peptide is less than about 100, 75, 60, 50, 40, 30, 20, 15, 10, or 5, and no less than 1.

[0570] In a further aspect, Class 2 glucagon related peptides exhibit activity at the GIP receptor, in which the glucagon and GLP-1 activity have been significantly reduced or destroyed (“GIP agonist glucagon peptides”), e.g., by amino acid modifications at positions 3 with Glu and 7 with Ile. In some embodiments, these Class 2 glucagon related peptides have about 10% or less of the activity of native glucagon at the glucagon receptor, e.g. about 1-10%, or about 0.1-10%, or greater than about 0.1%, 0.5%, or 1% but less than about 1%, 5%, or 10%. In some embodiments these Class 2 glucagon related peptides also have about 10% or less of the activity of native GLP-1 at the GLP-1 receptor, e.g. about 1-10%, or about 0.1-10%, or greater than about 0.1%, 0.5%, or 1% but less than about 1%, 5%, or 10%.

### Modifications

[0571] The modifications disclosed herein in reference to a Class 2 glucagon related peptide permit the manipulation of glucagon (SEQ ID NO: 1001) to create glucagon related peptides that exhibit increased GIP activity, glucagon activity, and/or GLP-1 activity.

Modifications that Affect GIP Activity

[0572] Enhanced activity at the GIP receptor is provided by an amino acid modification at position 1. For example, His at position 1 is substituted with a large, aromatic amino acid, optionally Tyr, Phe, Trp, amino-Phe, nitro-Phe, chloro-Phe, sulfo-Phe, 4-pyridyl-Ala, methyl-Tyr, or 3-amino Tyr. The combination of Tyr at position 1 with stabilization of the alpha helix within the region corresponding to amino acids 12-29 provided a Class 2 glucagon related peptide that activates the GIP receptor as well as the GLP-1 receptor and the glucagon receptor. The alpha helix structure can be stabilized by, e.g., formation of a covalent or non-covalent intramolecular bridge, or substitution and/or insertion of amino acids around positions 12-29 with an alpha helix-stabilizing amino acid (e.g., an α,α-disubstituted amino acid).

[0573] Enhanced activity at the GIP receptor is also provided by amino acid modifications at positions 27 and/or 28, and optionally at position 29. For example, the Met at position 27 is substituted with a large aliphatic amino acid, optionally Leu, the Asn at position 28 is substituted with a small aliphatic amino acid, optionally Ala, and the Thr at position 29 is substituted with a small aliphatic amino acid, optionally Gly. Substitution with LAG at positions 27-29 provides increased GIP activity relative to the native MNT sequence at those positions.

[0574] Enhanced activity at the GIP receptor is also provided by an amino acid modification at position 12. For example, position 12 is substituted with a large, aliphatic, nonpolar amino acid, optionally Ile. Enhanced activity at the GIP receptor is also provided by an amino acid modification at positions 17 and/or 18. For example, position 17 is substituted with a polar residue, optionally Gln, and position 18 is substituted with a small aliphatic amino acid, optionally Ala. A substitution with QA at positions 17 and 18 provides increased GIP activity relative to the native RR sequence at those positions.

[0575] Increased activity at the GIP receptor is provided by modifications that permit formation of an intramolecular bridge between amino acid side chains at positions from 12 to 29. For example, an intramolecular bridge can be formed by a covalent bond between the side chains of two amino acids at positions i and i+4 or between positions j and j+3, or between positions k and k+7. In exemplary embodiments, the bridge is between positions 12 and 16, 16 and 20, 20 and 24, 24 and 28, or 17 and 20. In other embodiments, non-covalent interactions such as salt bridges can be formed between positively and negatively charged amino acids at these positions.

[0576] Any of the modifications described above which increase GIP receptor activity can be applied individually or in combination. Combinations of the modifications that increase GIP receptor activity generally provide higher GIP activity than any of such modifications taken alone.

Modifications that Affect Glucagon Activity

[0577] In some embodiments, enhanced glucagon potency is provided by an amino acid modification at position 16 of native glucagon (SEQ ID NO: 1001). By way of nonlimiting example, such enhanced potency can be provided by substituting the naturally occurring serine at position 16 with glutamic acid or with another negatively charged amino acid having a side chain with a length of 4 atoms, or alternatively with any one of glutamine, homoglutamic acid, or homocysteic acid, or a charged amino acid having a side chain containing at least one heteroatom, (e.g. N, O, S, P) and with a side chain length of about 4 (or 3-5) atoms. In some embodiments the glucagon related peptide retains its original selectivity for the glucagon receptor relative to the GLP-1 receptors.

[0578] Glucagon receptor activity can be reduced by an amino acid modification at position 3, e.g. substitution of the naturally occurring glutamine at position 3, with an acidic, basic, or a hydrophobic amino acid. For example substitution at position 3 with glutamic acid, ornithine, or norleucine substantially reduces or destroys glucagon receptor activity.

[0579] Maintained or enhanced activity at the glucagon receptor may be achieved by modifying the Gln at position 3 with a glutamine analog, as described herein. For example, glucagon agonists can comprise the amino acid sequence of any of SEQ ID NOs: 1243-1248, 1250, 1251, and 1253-1256.

[0580] Restoration of glucagon activity which has been reduced by amino acid modifications at positions 1 and 2 is provided by modifications that that stabilize the alpha helix structure of the C-terminal portion (amino acids 12-29) of the glucagon related peptide or analog thereof. For example, an intramolecular bridge can be formed by a covalent bond between the side chains of two amino acids at positions i and i+4 or between positions j and j+3, or between positions k and k+7. In other embodiments, non-covalent interactions such as salt bridges can be formed between positively and negatively charged amino acids at these positions. In yet other embodiments, one or more α,α-disubstituted amino acids are inserted or substituted into this C-terminal portion (amino acids 12-29) at positions that retain the desired activity. For example, one, two, three or all of positions 16, 20, 21 or 24 are substituted with an α, α-disubstituted amino acid, e.g., AIB.

Modifications that Affect GLP-1 Activity

[0581] Enhanced activity at the GLP-1 receptor is provided by replacing the carboxylic acid of the C-terminal amino acid with a charge-neutral group, such as an amide or ester. Enhanced activity at the GLP-1 receptor is also provided by stabilizing the alpha-helix structure in the C-terminal portion of glucagon (around amino acids 12-29), e.g., through formation of an intramolecular bridge between the side chains of two amino acids, or substitution and/or insertion of amino acids around positions 12-29 with an alpha helix-stabilizing amino acid (e.g., an α,α-disubstituted amino acid), as further described herein. In exemplary embodiments, the side chains of the amino acid pairs 12 and 16, 13 and 17, 16 and 20, 17 and 21, 20 and 24 or 24 and 28 (amino acid pairs in which i=12, 16, 20, or 24) are linked to one another and thus stabilize the glucagon alpha helix. In some embodiments, the bridge or linker is about 8 (or about 7-9) atoms in length, particularly when the bridge is between positions i and i+4. In some embodiments, the bridge or linker is about 6 (or about 5-7) atoms in length, particularly when the bridge is between positions j and j+3.

[0582] In some embodiments, intramolecular bridges are formed by (a) substituting the naturally occurring serine at position 16 with glutamic acid or with another negatively charged amino acid having a side chain with a length of 4 atoms, or alternatively with any one of glutamine, homoglutamic acid, or homocysteic acid, or a charged amino acid having a side chain containing at least one heteroatom, (e.g. N, O, S, P) and with a side chain length of about 4 (or 3-5) atoms, and (b) substituting the naturally occurring glutamine at position 20 with another hydrophilic amino acid having a side chain that is either charged or has an ability to hydrogen-bond, and is at least about 5 (or about 4-6) atoms in length, for example, lysine, citrulline, arginine, or ornithine. The side chains of such amino acids at positions 16 and 20 can form a salt bridge or can be covalently linked. In some embodiments the two amino acids are bound to one another to form a lactam ring.

[0583] In some embodiments, stabilization of the alpha helix structure in the C-terminal portion of the glucagon related peptide is achieved through the formation of an intramolecular bridge other than a lactam bridge. For example, suitable covalent bonding methods include any one or more of olefin metathesis, lanthionine-based cyclization, disulfide bridge or modified sulfur-containing bridge formation, the use of α, ω-diaminoalkane tethers, the formation of metal-atom bridges, and other means of peptide cyclization are used to stabilize the alpha helix.

In yet other embodiments, one or more α, α-disubstituted amino acids are inserted or substituted into this C-terminal portion (amino acids 12-29) at positions that retain the desired activity. For example, one, two, three or all of positions 16, 20, 21 or 24 are substituted with an α, α-disubstituted amino acid, e.g., AIB. Increased activity at the GLP-1 receptor is provided by an amino acid modification at position 20 as described herein. Increased activity at the GLP-1 receptor is also provided by adding GPSSGAPPPS (SEQ ID NO: 1095) or XGPSSGAPPPS (SEQ ID NO: 1096) to the C-terminus. GLP-1 activity in such analogs can be further increased by modifying the amino acid at position 18, 28 or 29, or at position 18 and 29, as described herein. A further modest increase in GLP-1 potency is provided by modifying the amino acid at position 10 to be a large, aromatic amino acid residue, optionally Trp. Potency at the GLP-1 receptor can be further enhanced by an alanine substitution for the native arginine at position 18.

[0584] Reduced activity at the GLP-1 receptor is provided, e.g., by an amino acid modification at position 7 as described herein.

[0585] Any of the modifications described above in reference to a Class 2 glucagon related peptide which increase GLP-1 receptor activity can be applied individually or in combination. Combinations of the modifications that increase GLP-1 receptor activity generally provide higher GLP-1 activity than any of such modifications taken alone. For example, the invention provides glucagon related peptides that comprise modifications at position 16, at position 20, and at the C-terminal carboxylic acid group, optionally with a covalent bond between the amino acids at positions 16 and 20; glucagon related peptides that comprise modifications at position 16 and at the C-terminal carboxylic acid group; glucagon related peptides that comprise modifications at positions 16 and 20, optionally with a covalent bond between the amino acids at positions 16 and 20; and glucagon related peptides that comprise modifications at position 20 and at the C-terminal carboxylic acid group.

Modifications that Improve DPP-IV Resistance

[0586] Modifications at position 1 and/or 2 can increase the peptide's resistance to dipeptidyl peptidase IV (DPP IV) cleavage. For example, position 1 and/or position 2 may be substituted with a DPP-IV resistant amino acid as described herein. In some embodiments, the amino acid at position 2 is substituted with N-methyl alanine.

[0587] It was observed that modifications at position 2 (e.g. AIB at position 2) and in some cases modifications at position 1 (e.g., DMIA at position 1) may reduce glucagon activity, sometimes significantly; surprisingly, this reduction in glucagon activity can be restored by stabilizing the alpha-helix structure in the C-terminal portion of glucagon (around amino acids 12-29), e.g., through formation of a covalent bond between the side chains of two amino acids, as described herein. In some embodiments, the covalent bond is between amino acids at positions “i” and “i+4”, or positions “j” and “j+3”, e.g., between positions 12 and 16, 16 and 20, 20 and 24, 24 and 28, or 17 and 20. In exemplary embodiments, this covalent bond is a lactam bridge between a glutamic acid at position 16 and a lysine at position 20. In some embodiments, this covalent bond is an intramolecular bridge other than a lactam bridge, as described herein.

Modifications that Reduce Degradation

[0588] In yet further exemplary embodiments, any of the Class 2 glucagon related peptides can be further modified to improve stability by modifying the amino acid at position 15 and/or 16 of SEQ ID NO: 1001 to reduce degradation of the peptide over time, especially in acidic or alkaline buffers. Such modifications reduce cleavage of the Asp15-Ser16 peptide bond. In exemplary embodiments, the amino acid modification at position 15 is a deletion or substitution of Asp with glutamic acid, homoglutamic acid, cysteic acid or homocysteic acid. In other exemplary embodiments, the amino acid modification at position 16 is a deletion or substitution of Ser with Thr or AIB. In other exemplary embodiments, Ser at position 16 is substituted with glutamic acid or with another negatively charged amino acid having a side chain with a length of 4 atoms, or alternatively with any one of glutamine, homoglutamic acid, or homocysteic acid.

[0589] In some embodiments, the methionine residue present at position 27 of the native peptide is modified, e.g. by deletion or substitution. Such modifications may prevent oxidative degradation of the peptide. In some embodiments, the Met at position 27 is substituted with leucine, isoleucine or norleucine. In some specific embodiments, Met at position 27 is substituted with leucine or norleucine.

[0590] In some embodiments, the Gln at position 20 and/or 24 is modified, e.g. by deletion or substitution. Such modifications can reduce degradation that occurs through deamidation of Gln. In some embodiments, the Gln at position 20 and/or 24 is substituted with Ser, Thr, Ala or AIB. In some embodiments the Gln at position 20 and/or 24 is substituted with Lys, Arg, Orn, or Citrulline.

[0591] In some embodiments, the Asp at position 21 is modified, e.g. by deletion or substitution. Such modifications can reduce degradation that occurs through dehydration of Asp to form a cyclic succinimide intermediate followed by isomerization to iso-aspartate. In some embodiments, position 21 is substituted with Glu, homoglutamic acid or homocysteic acid. In some specific embodiments, position 21 is substituted with Glu.

### Stabilization of the Alpha Helix Structure

[0592] Stabilization of the alpha-helix structure in the C-terminal portion of the Class 2 glucagon related peptide (around amino acids 12-29) provides enhanced GLP-1 and/or GIP activity and restores glucagon activity which has been reduced by amino acid modifications at positions 1 and/or 2. The alpha helix structure can be stabilized by, e.g., formation of a covalent or non-covalent intramolecular bridge, or substitution and/or insertion of amino acids around positions 12-29 with an alpha helix-stabilizing amino acid (e.g., an α,α-disubstituted amino acid). Stabilization of the alpha-helix structure of a GIP agonist may be accomplished as described herein.

### Exemplary Embodiments

[0593] In accordance with some embodiments of the invention, the analog of glucagon (SEQ ID NO: 1001) having GIP agonist activity comprises SEQ ID NO: 1001 with (a) an amino acid modification at position 1 that confers GIP agonist activity, (b) a modification which stabilizes the alpha helix structure of the C-terminal portion (amino acids 12-29) of the analog, and (c) optionally, 1 to 10 (e.g., 1, 2, 3, 4, 5, 6, 7, 8, 9, 10) further amino acid modifications. In some embodiments, the analog exhibits at least about 1% activity of native GIP at the GIP receptor or any other activity level at the GIP receptor described herein.

[0594] In certain embodiments, the modification which stabilizes the alpha helix structure is one which provides or introduces an intramolecular bridge, including, for example, a covalent intramolecular bridge, such as any of those described herein. The covalent intramolecular bridge in some embodiments is a lactam bridge. The lactam bridge of the analog of these embodiments can be a lactam bridge as described herein. See, e.g., the teachings of lactam bridges under the section “Stabilization of the Alpha Helix Structure.” For example, the lactam bridge may be one which is between the side chains of amino acids at positions i and i+4 or between the side chains of amino acids at positions j and j+3, wherein i is 12, 13, 16, 17, 20 or 24, and wherein j is 17. In certain embodiments, the lactam bridge can be between the amino acids at positions 16 and 20, wherein one of the amino acids at positions 16 and 20 is substituted with Glu and the other of the amino acids at positions 16 and 20 is substituted with Lys.

[0595] In alternative embodiments, the modification which stabilizes the alpha helix structure is the introduction of one, two, three, or four α,α-disubstituted amino acids at position(s) 16, 20, 21, and 24 of the analog. In some embodiments, the α,α-disubstituted amino acid is AIB. In certain aspects, the α,α-disubstituted amino acid (e.g., AIB) is at position 20 and the amino acid at position 16 is substituted with a positive-charged amino acid, such as, for example, an amino acid of Formula IV, which is described herein. The amino acid of Formula IV may be homoLys, Lys, Orn, or 2,4-diaminobutyric acid (Dab).

[0596] In specific aspects of the invention, the amino acid modification at position 1 is a substitution of His with an amino acid lacking an imidazole side chain, e.g. a large, aromatic amino acid (e.g., Tyr).

[0597] In certain aspects, the analog of glucagon comprises amino acid modifications at one, two or all of positions 27, 28 and 29. For example, the Met at position 27 can be substituted with a large aliphatic amino acid, optionally Leu, the Asn at position 28 can be substituted with a small aliphatic amino acid, optionally Ala, the Thr at position 29 can be substituted with a small aliphatic amino acid, optionally Gly, or a combination of two or three of the foregoing. In specific embodiments, the analog of glucagon comprises Leu at position 27, Ala at position 28, and Gly or Thr at position 29.

[0598] In certain embodiments of the invention, the analog of glucagon comprises an extension of 1 to 21 amino acids C-terminal to the amino acid at position 29. The extension can comprise the amino acid sequence of SEQ ID NO: 1095 or 1096, for instance. Additionally or alternatively, the analog of glucagon can comprise an extension of which 1-6 amino acids of the extension are positive-charged amino acids. The positive-charged amino acids may be amino acids of Formula IV, including, but not limited to Lys, homoLys, Orn, and Dab.

[0599] The analog of glucagon in some embodiments is acylated or alkylated as described herein. For instance, the acyl or alkyl group may be attached to the analog of glucagon, with or without a spacer, at position 10 or 40 of the analog, as further described herein. The analog may additionally or alternatively be modified to comprise a hydrophilic moiety as further described herein. Furthermore, in some embodiments, the analog comprises any one or a combination of the following modifications:
[0600] (a) Ser at position 2 substituted with D-Ser, Ala, D-Ala, Gly, N-methyl-Ser, AIB, Val, or α-amino-N-butyric acid;
[0601] (b) Tyr at position 10 substituted with Trp, Lys, Orn, Glu, Phe, or Val:
[0602] (c) Linkage of an acyl group to a Lys at position 10;
[0603] (d) Lys at position 12 substituted with Arg or Ile;
[0604] (e) Ser at position 16 substituted with Glu, Gln, homoglutamic acid, homocysteic acid, Thr, Gly, or AIB;
[0605] (f) Arg at position 17 substituted with Gln;
[0606] (g) Arg at position 18 substituted with Ala, Ser, Thr, or Gly;
[0607] (h) Gln at position 20 substituted with Ser, Thr, Ala, Lys, Citrulline, Arg, Orn, or AIB;
[0608] (i) Asp at position 21 substituted with Glu, homoglutamic acid, homocysteic acid;
[0609] (j) Val at position 23 substituted with Ile;
[0610] (k) Gln at position 24 substituted with Asn, Ser, Thr, Ala, or AIB;
[0611] (l) and a conservative substitution at any of positions 2 5, 9, 10, 11, 12. 13, 14, 15, 16, 8 19 20, 21. 24, 27, 28, and 29.

[0612] In exemplary embodiments, the analog of glucagon (SEQ ID NO: 1001) having GIP agonist activity comprises the following modifications:
[0613] (a) an amino acid modification at position 1 that confers GIP agonist activity,
[0614] (b) a lactam bridge between the side chains of amino acids at positions i and i+4 or between the side chains of amino acids at positions j and j+3, wherein i is 12, 13, 16, 17, 20 or 24, and wherein j is 17,
[0615] (c) amino acid modifications at one, two or all of positions 27, 28 and 29, e.g., amino acid modifications at position 27 and/or 28, and
[0616] (d) 1-9 or 1-6 further amino acid modifications, e.g. 1, 2, 3, 4, 5, 6, 7, 8 or 9 further amino acid modifications,
   and the EC50 of the analog for GIP receptor activation is about 10 nM or less.

[0617] The lactam bridge of the analog of these embodiments can be a lactam bridge as described herein. For example, the lactam bridge can be between the amino acids at positions 16 and 20, wherein one of the amino acids at positions 16 and 20 is substituted with Glu and the other of the amino acids at positions 16 and 20 is substituted with Lys. In accordance with these embodiments, the analog can comprise, for example, the amino acid sequence of any of SEQ ID NOs: 1005-1094.

[0618] In other exemplary embodiments, the analog of glucagon (SEQ ID NO: 1001) having GIP agonist activity comprises the following modifications:
[0619] (a) an amino acid modification at position 1 that confers GIP agonist activity,
[0620] (b) one, two, three, or all of the amino acids at positions 16, 20, 21, and 24 of the analog is substituted with an α,α-disubstituted amino acid,
[0621] (c) amino acid modifications at one, two or all of positions 27, 28 and 29, e.g., amino acid modifications at position 27 and/or 28, and
[0622] (d) 1-9 or 1-6 further amino acid modifications, e.g. 1, 2, 3, 4, 5, 6, 7, 8 or 9 further amino acid modifications,
   and the EC50 of the analog for GIP receptor activation is about 10 nM or less.

[0623] The α,α-disubstituted amino acid of the analog of these embodiments can be any α,α-disubstituted amino acid, including, but not limited to, aminoisobutyric acid (AIB), an amino acid disubstituted with the same or a different group selected from methyl, ethyl, propyl, and n-butyl, or with a cyclooctane or cycloheptane (e.g., 1-aminocyclooctane-1-carboxylic acid). In certain embodiments, the α,α-disubstituted amino acid is AIB. In certain embodiments, the amino acid at position 20 is substituted with an α,α-disubstituted amino acid, e.g., AIB. In accordance with these embodiments, the analog can comprise, for example, the amino acid sequence of any of SEQ ID NOs: 1099-1141, 1144-1164, 1166-1169, and 1173-1178.

[0624] In yet other exemplary embodiments, the analog of glucagon (SEQ ID NO: 1001) having GIP agonist activity comprises the following modifications:
[0625] (a) an amino acid modification at position 1 that confers GIP agonist activity,
[0626] (b) an amino acid substitution of Ser at position 16 with an amino acid of Formula IV:

[chemical structure]

[0627] wherein n is 1 to 16, or 1 to 10, or 1 to 7, or 1 to 6, or 2 to 6, each of R₁ and R₂ is independently selected from the group consisting of H, C₁-C₁₈ alkyl, (C₁-C₁₈ alkyl)OH, (C₁-C₁₈ alkyl)NH₂, (C₁-C₁₈ alkyl)SH, (C₀-C₄ alkyl)(C₃-C₆)cycloalkyl, (C₀-C₄ alkyl)(C₂-C₅ heterocyclic), (C₀-C₄ alkyl)(C₆-C₁₀ aryl)R₇, and (C₁-C₄ alkyl)(C₃-C₉ heteroaryl), wherein R₇ is H or OH, and the side chain of the amino acid of Formula IV comprises a free amino group,
[0628] (c) an amino acid substitution of the Gln at position 20 with an alpha, alpha-disubstituted amino acid,
[0629] (d) amino acid modifications at one, two or all of positions 27, 28 and 29, e.g., amino acid modifications at position 27 and/or 28, and
[0630] (e) 1-9 or 1-6 further amino acid modifications, e.g. 1, 2, 3, 4, 5, 6, 7, 8 or 9 further amino acid modifications,
   and the EC50 of the analog for GIP receptor activation is about 10 nM or less.

[0631] The amino acid of Formula IV of the analog of these embodiments may be any amino acid, such as, for example, the amino acid of Formula IV, wherein n is 1, 2, 3, 4, 5, 6, 7, 8, 9, 10, 11, 12, 13, 14, 15, or 16. In certain embodiments, n is 2, 3, 4, or 5, in which case, the amino acid is Dab, Orn, Lys, or homoLys respectively.

[0632] The alpha, alpha-disubstituted amino acid of the analog of these embodiments may be any alpha, alpha-disubstituted amino acid, including, but not limited to, aminoisobutyric acid (AIB), an amino acid disubstituted with the same or a different group selected from methyl, ethyl, propyl, and n-butyl, or with a cyclooctane or cycloheptane (e.g., 1-aminocyclooctane-1-carboxylic acid). In certain embodiments, the alpha, alpha-disubstituted amino acid is AIB. In accordance with these embodiments, the analog can comprise, for example, the amino acid sequence of any of SEQ ID NOs: 1099-1165.

[0633] In yet other exemplary embodiments, the analog of glucagon (SEQ ID NO: 1001) having GIP agonist activity comprises:
[0634] (a) an amino acid modification at position 1 that confers GIP agonist activity, and
[0635] (b) an extension of about 1 to about 21 amino acids C-terminal to the amino acid at position 29, wherein at least one of the amino acids of the extension is acylated or alkylated,
   wherein the EC50 of the analog for GIP receptor activation is about 10 nM or less.

[0636] In some embodiments, the acylated or alkylated amino acid is an amino acid of Formula I, II, or III. In more specific embodiments, the amino acid of Formula I is Dab, Orn, Lys, or homoLys. Also, in some embodiments, the extension of about 1 to about 21 amino acids comprises the amino acid sequence of GPSSGAPPPS (SEQ ID NO: 1095) or XGPSSGAPPPS (SEQ ID NO: 1096), wherein X is any amino acid, or GPSSGAPPPK (SEQ ID NO: 1170) or XGPSSGAPPPK (SEQ ID NO: 1171) or XGPSSGAPPPSK (SEQ ID NO: 1172), wherein X is Gly or a small, aliphatic or non-polar or slightly polar amino acid. In some embodiments, the about 1 to about 21 amino acids may comprise sequences containing one or more conservative substitutions relative to SEQ ID NO: 1095, 1096, 1170, 1171 or 1172. In some embodiments, the acylated or alkylated amino acid is located at position 37, 38, 39, 40, 41, 42, or 43 of the C-terminally-extended analog. In certain embodiments, the acylated or alkylated amino acid is located at position 40 of the C-terminally extended analog.

[0637] In some embodiments, the analog having GIP agonist activity further comprises amino acid modifications at one, two or all of positions 27, 28 and 29, e.g., amino acid modifications at position 27 and/or 28.

[0638] In any of the above exemplary embodiments, the amino acid modification at position 1 that confers GIP agonist activity can be a substitution of His with an amino acid lacking an imidazole side chain. The amino acid modification at position 1 can, for example, be a substitution of His with a large, aromatic amino acid. In some embodiments, the large, aromatic amino acid is any of those described herein, including, for example, Tyr.

[0639] Also, with regard to the above exemplary embodiments, amino acid modifications at one, two, or all of positions 27, 28, and 29 can be any of the modifications at these positions described herein. For example, the Met at position 27 can be substituted with a large aliphatic amino acid, optionally Leu, the Asn at position 28 can be substituted with a small aliphatic amino acid, optionally Ala, and/or the Thr at position 29 can be substituted with a small aliphatic amino acid, optionally Gly. Alternatively, the analog can comprise such amino acid modifications at position 27 and/or 28.

[0640] The analog of the above exemplary embodiments can further comprise 1-9 or 1-6 further, additional amino acid modifications, e.g. 1, 2, 3, 4, 5, 6, 7, 8 or 9 further amino acid modifications, such as, for example, any of the modifications described herein which increase or decrease the activity at any of the GIP, GLP-1, and glucagon receptors, improve solubility, improve duration of action or half-life in circulation, delay the onset of action, or increase stability. The analog can further comprise, for example, an amino acid modification at position 12, optionally, a substitution with Ile, and/or amino acid modifications at positions 17 and 18, optionally substitution with Q at position 17 and A at position 18, and/or an addition of GPSSGAPPPS (SEQ ID NO: 1095) or XGPSSGAPPPS (SEQ ID NO: 1096), or sequences containing one or more conservative substitutions relative to SEQ ID NO: 1095 or 1096, to the C-terminus. The analog can comprise one or more of the following modifications:
[0641] (i) Ser at position 2 substituted with D-Ser, Ala, D-Ala, Gly, N-methyl-Ser, AIB, Val, or α-amino-N-butyric acid;
[0642] (ii) Tyr at position 10 substituted with Trp, Lys, Orn, Glu, Phe, or Val;
[0643] (iii) Linkage of an acyl group to a Lys at position 10;
[0644] (iv) Lys at position 12 substituted with Arg;
[0645] (v) Ser at position 16 substituted with Glu, Gln, homoglutamic acid, homocysteic acid, Thr, Gly, or AIB;
[0646] (vi) Arg at position 17 substituted with Gln;
[0647] (vii) Arg at position 18 substituted with Ala, Ser, Thr, or Gly;
[0648] (viii) Gln at position 20 substituted with Ala, Ser, Thr, Lys, Citrulline, Arg, Orn, or AIB;
[0649] (ix) Asp at position 21 substituted with Glu, homoglutamic acid, homocysteic acid;
[0650] (x) Val at position 23 substituted with Ile;
[0651] (xi) Gln at position 24 substituted with Asn, Ala, Ser, Thr, or AIB; and
[0652] (xii) a conservative substitution at any of positions 2, 5, 9, 10, 11, 12, 13, 14, 15, 16, 17, 18, 19, 20, 21, 24, 27, 28, and 29.
   The analog in some embodiments comprise a combination of the modifications (i) through (xii). Alternatively or additionally, the analog can comprise an amino acid modification at position 3 (e.g., an amino acid substitution of Gln with Glu), wherein the analog has less than 1% of the activity of glucagon at the glucagon receptor. Alternatively or additionally, the analog can comprise an amino acid modification at position 7 (e.g., an amino acid substitution of Thr with an amino acid lacking a hydroxyl group, e.g., Abu or Ile), wherein the analog has less than about 10% of the activity of GLP-1 at the GLP-1 receptor.

[0653] With regard to the exemplary embodiments, the analog can be covalently linked to a hydrophilic moiety. In some embodiments, the analog is covalently linked to the hydrophilic moiety at any of amino acid positions 16, 17, 20, 21, 24, 29, 40, or the C-terminus. In certain embodiments, the analog comprises a C-terminal extension (e.g., an amino acid sequence of SEQ ID NO: 1095) and an addition of an amino acid comprising the hydrophilic moiety, such that the hydrophilic moiety is covalently linked to the analog at position 40.

[0654] In still further exemplary embodiments, the analog of glucagon having GIP agonist activity comprises the amino acid sequence according to any one of SEQ ID NOs: 1227, 1228, 1229 or 1230 that further comprises the following modifications:
[0655] (a) optionally, an amino acid modification at position 1 that confers GIP agonist activity,
[0656] (b) an extension of about 1 to about 21 amino acids C-terminal to the amino acid at position 29, wherein at least one of the amino acids of the extension is acylated or alkylated, and
[0657] (d) up to 6 further amino acid modifications,
   wherein the EC50 of the analog for GIP receptor activation is about 10 nM or less. In some aspects, the acylated or alkylated amino acid is an amino acid of Formula I, II, or III. In more specific embodiments, the amino acid of Formula I is Dab, Orn, Lys, or homoLys. Also, in some embodiments, the about 1 to about 21 amino acids comprises the amino acid sequence of GPSSGAPPPS (SEQ ID NO: 1095) or XGPSSGAPPPS (SEQ ID NO: 1096), wherein X is any amino acid, or GPSSGAPPPK (SEQ ID NO: 1170) or XGPSSGAPPPK (SEQ ID NO: 1171) or XGPSSGAPPPSK (SEQ ID NO: 1172), wherein X is Gly or a small, aliphatic or non-polar or slightly polar amino acid. In some embodiments, the about 1 to about 21 amino acids may comprise sequences containing one or more conservative substitutions relative to SEQ ID NO: 1095, 1096, 1170, 1171 or 1172. In some embodiments, the acylated or alkylated amino acid is located at position 37, 38, 39, 40, 41, 42, or 43 of the C-terminally-extended analog. In certain embodiments, the acylated or alkylated amino acid is located at position 40 of the C-terminally extended analog. In any of the above exemplary embodiments, the amino acid at position 1 that confers GIP agonist activity can be an amino acid lacking an imidazole side chain.

[0658] The analog of the above exemplary embodiments can further comprise 1-6 further amino acid modifications, such as, for example, any of the modifications described herein which increase or decrease the activity at any of the GIP, GLP-1, and glucagon receptors, improve solubility, improve duration of action or half-life in circulation, delay the onset of action, or increase stability.

[0659] In certain aspects, glucagon analogs described in the above exemplary embodiment, comprise further amino acid modifications at one, two or all of positions 27, 28 and 29. Modifications at these positions can be any of the modifications described herein relative to these positions. For example, relative to SEQ ID NO: 1227, 1228, 1229 or 1230, position 27 can be substituted with a large aliphatic amino acid (e.g., Leu, Ile or norleucine) or Met, position 28 can be substituted with another small aliphatic amino acid (e.g., Gly or Ala) or Asn, and/or position 29 can be substituted with another small aliphatic amino acid (e.g., Ala or Gly) or Thr. Alternatively, the analog can comprise such amino acid modifications at position 27 and/or 28.

[0660] The analog can further comprise one or more of the following additional modifications:
[0661] (i) the amino acid at position 2 is any one of D-Ser, Ala, D-Ala, Gly, N-methyl-Ser, AIB, Val, or α-amino-N-butyric acid;
[0662] (ii) the amino acid at position 10 is Tyr, Trp, Lys, Orn, Glu, Phe, or Val;
[0663] (iii) linkage of an acyl group to a Lys at position 10;
[0664] (iv) the amino acid at position 12 is Ile, Lys or Arg;
[0665] (v) the amino acid at position 16 is any one of Ser, Glu, Gln, homoglutamic acid, homocysteic acid, Thr, Gly, or AIB;
[0666] (vi) the amino acid at position 17 is Gln or Arg;
[0667] (vii) the amino acid at position 18 is any one of Ala, Arg, Ser, Thr, or Gly;
[0668] (viii) the amino acid at position 20 is any one of Ala, Ser, Thr, Lys, Citrulline, Arg, Orn, or AIB or another alpha, alpha-disubstituted amino acid;
[0669] (ix) the amino acid at position 21 is any one of Glu, Asp, homoglutamic acid, homocysteic acid;
[0670] (x) the amino acid at position 23 is Val or Ile;
[0671] (xi) the amino acid at position 24 is any one of Gln, Asn, Ala, Ser, Thr, or AIB; and
[0672] (xii) one or more conservative substitutions at any of positions 2, 5, 9, 10, 11, 12, 13, 14, 15, 16, 17, 18, 19, 20, 21, 24, 27, 28, and 29.

[0673] The analog in some embodiments comprise a combination of the modifications (i) through (xii). Alternatively or additionally, the analog can comprise an amino acid modification at position 3 (e.g., an amino acid substitution of Gin with Glu), wherein the analog has less than 1% of the activity of glucagon at the glucagon receptor. Alternatively or additionally, the analog can comprise an amino acid modification at position 7 (e.g., an amino acid substitution of Thr with an amino acid lacking a hydroxyl group, e.g., Abu or lie), wherein the analog has less than about 10% of the activity of GLP-1 at the GLP-1 receptor.

[0674] In the above exemplary embodiments, wherein the analog comprises an acyl or alkyl group, the analog may be attached to the acyl or alkyl group via a spacer, as described herein. The spacer, for example, may be 3 to 10 atoms in length and may be, for instance, an amino acid (e.g., 6-amino hexanoic acid, any amino acid described herein), a dipeptide (e.g., Ala-Ala, βAla-βAla, Leu-Leu, Pro-Pro, γGlu-γGlu), a tripeptide, or a hydrophilic or hydrophobic bifunctional spacer. In certain aspects, the total length of the spacer and the acyl or alkyl group is about 14 to about 28 atoms. In some embodiments, the amino acid spacer is not γ-Glu. In some embodiments, the dipeptide spacer is not γ-Glu-γ-Glu.

[0675] In some very specific embodiments, an analog of the invention comprises an amino acid sequence selected from the group consisting of SEQ ID NOs: 1099-1141, 1144-1164, 1166, 1192-1207, 1209-1221 and 1223 or selected from the group consisting of SEQ ID NOs: 1167-1169, 1173-1178 and 1225.

[0676] In still further exemplary embodiments, the analog of glucagon having GIP agonist activity comprises an acyl or alkyl group (e.g., an acyl or alkyl group which is non-native to a naturally occurring amino acid), wherein the acyl or alkyl group is attached to a spacer, wherein (i) the spacer is attached to the side chain of the amino acid at position 10 of the analog; or (ii) the analog comprises an extension of 1 to 21 amino acids C-terminal to the amino acid at position 29 and the spacer is attached to the side chain of an amino acid corresponding to one of positions 37-43 relative to SEQ ID NO: 1001, wherein the EC50 of the analog for GIP receptor activation is about 10 nM or less.

[0677] In such embodiments, the analog may comprise an amino acid sequence of SEQ ID NO: 1001 with (i) an amino acid modification at position 1 that confers GIP agonist activity, (ii) amino acid modifications at one, two, or all of positions 27, 28, and 29, (iii) at least one of:
[0678] (A) the analog comprises a lactam bridge between the side chains of amino acids at positions i and i+4 or between the side chains of amino acids at positions j and j+3, wherein i is 12, 13, 16, 17, 20 or 24, and wherein j is 17;
[0679] (B) one, two, three, or all of the amino acids at positions 16, 20, 21, and 24 of the analog is substituted with an α,α-disubstituted amino acid; or
[0680] (C) the analog comprises (i) an amino acid substitution of Ser at position 16 with an amino acid of Formula IV:

[chemical structure]

wherein n is 1 to 7, wherein each of R1 and R2 is independently selected from the group consisting of H, C₁-C₁₈ alkyl, (C₁-C₁₈ alkyl)OH, (C₁-C₁₈ alkyl)NH₂, (C₁-C₁₈ alkyl)SH, (C₀-C₄ alkyl)(C₃-C₆)cycloalkyl, (C₀-C₄ alkyl)(C₂-C₅ heterocyclic), (C₀-C₄ alkyl)(C₆-C₁₀ aryl)R₇, and (C₁-C₄ alkyl)(C₃-C₉ heteroaryl), wherein R₇ is H or OH, and the side chain of the amino acid of Formula IV comprises a free amino group; and (ii) an amino acid substitution of the Gin at position 20 with an alpha, alpha-disubstituted amino acid, and (iv) up to 6 further amino acid modifications.

[0681] The alpha, alpha-disubstituted amino acid of the analog of these embodiments may be any alpha, alpha-disubstituted amino acid, including, but not limited to, aminoisobutyric acid (AIB), an amino acid disubstituted with the same or a different group selected from methyl, ethyl, propyl, and n-butyl, or with a cyclooctane or cycloheptane (e.g., 1-aminocyclooctane-1-carboxylic acid). In certain embodiments, the alpha, alpha-disubstituted amino acid is AIB.

[0682] The amino acid of Formula IV of the analog of these embodiments may be any amino acid, such as, for example, the amino acid of Formula IV, wherein n is 1, 2, 3, 4, 5, 6, 7, 8, 9, 10, 11, 12, 13, 14, 15, or 16. In certain embodiments, n is 2, 3, 4, or 5, in which case, the amino acid is Dab, Orn, Lys, or homoLys respectively. In any of the above exemplary embodiments, the amino acid modification at position 1 that confers GIP agonist activity can be a substitution of His with an amino acid lacking an imidazole side chain.

[0683] Also, with regard to the above exemplary embodiments, amino acid modifications at one, two, or all of positions 27, 28, and 29 can be any of the modifications at these positions described herein. For example, the Met at position 27 can be substituted with a large aliphatic amino acid, optionally Leu, the Asn at position 28 can be substituted with a small aliphatic amino acid, optionally Ala, and/or the Thr at position 29 can be substituted with a small aliphatic amino acid, optionally Gly. Alternatively, the analog can comprise such amino acid modifications at position 27 and/or 28.

[0684] The analog can further comprise, for example, an amino acid modification at position 12, optionally, a substitution with Ile, and/or amino acid modifications at positions 17 and 18, optionally substitution with Q at position 17 and A at position 18, and/or an addition of GPSSGAPPPS (SEQ ID NO: 1095) or XGPSSGAPPPS (SEQ ID NO: 1096), or sequences containing one or more conservative substitutions relative to SEQ ID NO: 1095 or 1096, to the C-terminus. The analog can comprise one or more of the following modifications:
[0685] (i) Ser at position 2 substituted with D-Ser, Ala, D-Ala, Gly, N-methyl-Ser, AIB, Val, or α-amino-N-butyric acid;
[0686] (ii) Tyr at position 10 substituted with Trp, Lys, Orn, Glu, Phe, or Val;
[0687] (iii) Linkage of an acyl group to a Lys at position 10;
[0688] (iv) Lys at position 12 substituted with Arg;
[0689] (v) Ser at position 16 substituted with Glu, Gln, homoglutamic acid, homocysteic acid, Thr, Gly, Lys, or AIB;
[0690] (vi) Arg at position 17 substituted with Gln;
[0691] (vii) Arg at position 18 substituted with Ala, Ser, Thr, or Gly;
[0692] (viii) Gln at position 20 substituted with Ala, Ser, Thr, Lys, Citrulline, Arg, Orn, or AIB;
[0693] (ix) Asp at position 21 substituted with Glu, homoglutamic acid, homocysteic acid;
[0694] (x) Val at position 23 substituted with Ile;
[0695] (xi) Gln at position 24 substituted with Asn, Ala, Ser, Thr, or AIB; and
[0696] (xii) a conservative substitution at any of positions 2, 5, 9, 10, 11, 12, 13, 14, 15, 16, 17, 18, 19, 20, 21, 24, 27, 28, and 29.
   The analog in some embodiments comprise a combination of the modifications (i) through (xii). Alternatively or additionally, the analog can comprise an amino acid modification at position 3 (e.g., an amino acid substitution of Gln with Glu), wherein the analog has less than 1% of the activity of glucagon at the glucagon receptor. Alternatively or additionally, the analog can comprise an amino acid modification at position 7 (e.g., an amino acid substitution of Thr with an amino acid lacking a hydroxyl group, e.g., Abu or Ile), a deletion of the amino acid(s) C-terminal to the amino acid at position 27 or 28, yielding a 27- or 28-amino acid peptide, or a combination thereof, wherein the analog has less than about 10% of the activity of GLP-1 at the GLP-1 receptor.

[0697] With regard to the exemplary embodiments, the analog can be covalently linked to a hydrophilic moiety. In some embodiments, the analog is covalently linked to the hydrophilic moiety at any of amino acid positions 16, 17, 20, 21, 24, 29, 40, or the C-terminus. In certain embodiments, the analog comprises a C-terminal extension (e.g., an amino acid sequence of SEQ ID NO: 1095) and an addition of an amino acid comprising the hydrophilic moiety, such that the hydrophilic moiety is covalently linked to the analog at position 40.

[0698] In some embodiments, the hydrophilic moiety is covalently linked to a Lys, Cys, Orn, homocysteine, or acetyl-phenylalanine of the analog. The Lys, Cys, Orn, homocysteine, or acetyl-phenylalanine may be an amino acid that is native to the glucagon sequence (SEQ ID NO: 1001) or it may be an amino acid which is replacing a native amino acid of SEQ ID NO: 1001. In some embodiments, wherein the hydrophilic moiety is attached to a Cys, the linkage to the hydrophilic moiety can comprise the structure

[chemical structure]

[0699] With regard to the analogs comprising a hydrophilic moiety, the hydrophilic moiety may be any of those described herein. See, e.g., the teachings under the section “Linkage of hydrophilic moieties.” In some embodiments, the hydrophilic moiety is a polyethylene glycol (PEG). The PEG in certain embodiments has a molecular weight of about 1,000 Daltons to about 40,000 Daltons, e.g., about 20,000 Daltons to about 40,000 Daltons.

[0700] In the exemplary embodiments, wherein the analog comprises an acyl or alkyl group, which is attached to the analog via a spacer, the spacer can be any spacer as described herein. The spacer, for example, may be 3 to 10 atoms in length and may be, for instance, an amino acid (e.g., 6-amino hexanoic acid, any amino acid described herein), a dipeptide (e.g., Ala-Ala, βAla-βAla, Leu-Leu, Pro-Pro, γGlu-γGlu), a tripeptide, or a hydrophilic or hydrophobic bifunctional spacer. In certain aspects, the total length of the spacer and the acyl or alkyl group is about 14 to about 28 atoms. In some embodiments, the amino acid spacer is not γ-Glu. In some embodiments, the dipeptide spacer is not γ-Glu-γ-Glu.

[0701] The acyl or alkyl group is any acyl or alkyl group as described herein, such as an acyl or alkyl group which is non-native to a naturally occurring amino acid. The acyl or alkyl group in some embodiments is a C4 to C30 fatty acyl group, such as, for example, a C10 fatty acyl or alkyl group, a C12 fatty acyl or alkyl group, a C14 fatty acyl or alkyl group, a C16 fatty acyl or alkyl group, a C18 fatty acyl or alkyl group, a C20 acyl or alkyl group, or a C22 acyl or alkyl group, or a C4 to C30 alkyl group. In specific embodiments, the acyl group is a C12 to C18 fatty acyl group (e.g., a C14 or C16 fatty acyl group).

[0702] In some embodiments, the extension of about 1 to about 21 amino acids C-terminal to the amino acid at position 29 of the analog comprises the amino acid sequence of GPSSGAPPPS (SEQ ID NO: 1095) or XGPSSGAPPPS (SEQ ID NO: 1096), wherein X is any amino acid, or GPSSGAPPPK (SEQ ID NO: 1170) or XGPSSGAPPPK (SEQ ID NO: 1171) or XGPSSGAPPPSK (SEQ ID NO: 1172), wherein X is Gly or a small, aliphatic or non-polar or slightly polar amino acid. In some embodiments, the about 1 to about 21 amino acids may comprise sequences containing one or more conservative substitutions relative to SEQ ID NO: 1095, 1096, 1170, 1171 or 1172. In some embodiments, the acylated or alkylated amino acid is located at position 37, 38, 39, 40, 41, 42, or 43 of the C-terminally-extended analog. In certain embodiments, the acylated or alkylated amino acid is located at position 40 of the C-terminally extended analog. In certain embodiments, the acyl or alkyl group is covalently linked to an amino acid which is native to SEQ ID NO: 1001, 1227, 1228, 1229 or 1230 or it may be linked to a substituted amino acid. In certain embodiments, the acyl or alkyl group is covalently linked to an amino acid which is native to SEQ ID NO: 1095, 1096, 1171 or 1172.

[0703] The GIP agonist may be a peptide comprising the amino acid sequence of any of the amino acid sequences, e.g., SEQ ID NOs: 1005-1094, optionally with up to 1, 2, 3, 4, or 5 further modifications that retain GIP agonist activity. In certain embodiments, the GIP agonist comprises the amino acids of any of SEQ ID NOs: 1099-1262.

### Class 3 Glucagon Related Peptides

[0704] In certain embodiments, the glucagon related peptide is a Class 3 glucagon related peptide, which is described herein and in International Patent Application No. PCT/US2009/47438 (filed on Jun. 16, 2009), International Patent Application Publication No. WO 2008/101017, published on Aug. 21, 2008, and U.S. Provisional Application No. 61/090,412 and U.S. Application No. 61/177,476, the contents of which are incorporated by reference in their entirety.

[0705] Some of the biological sequences referenced in the following section (SEQ ID NOs: 89-108, 114-128 and 146-656) relating to Class 3 glucagon related peptides correspond to SEQ ID NOs: 89-108, 114-128 and 146-656 in International Patent Application No. PCT/US2009/47438.

### Activity

[0706] The Class 3 glucagon related peptide can be a peptide that exhibits increased activity at the glucagon receptor, and in further embodiments exhibits enhanced biophysical stability and/or aqueous solubility. In addition, in some embodiments, the Class 3 glucagon related peptide has lost native glucagon's selectivity for the glucagon receptor verses the GLP-1 receptor, and thus represents co-agonists of those two receptors. Selected amino acid modifications within the Class 3 glucagon related peptide can control the relative activity of the peptide at the GLP-1 receptor verses the glucagon receptor. Thus, the Class 3 glucagon related peptide can be a glucagon/GLP-1 co-agonist that has higher activity at the glucagon receptor versus the GLP-1 receptor, a glucagon/GLP-1 co-agonist that has approximately equivalent activity at both receptors, or a glucagon/GLP-1 co-agonist that has higher activity at the GLP-1 receptor versus the glucagon receptor. The latter category of co-agonist can be engineered to exhibit little or no activity at the glucagon receptor, and yet retain ability to activate the GLP-1 receptor with the same or better potency than native GLP-1. Any of these co-agonists may also include modifications that confer enhanced biophysical stability and/or aqueous solubility.

[0707] Modifications of the Class 3 glucagon related peptide can be made to produce a glucagon related peptide having anywhere from at least about 1% (including at least about 1.5%, 2%, 5%, 7%, 10%, 20%, 30%, 40%, 50%, 60%, 75%, 100%, 125%, 150%, 175%) to about 200% or higher activity at the GLP-1 receptor relative to native GLP-1 and anywhere from at least about 1% (including about 1.5%, 2%, 5%, 7%, 10%, 20%, 30%, 40%, 50%, 60%, 75%, 100%, 125%, 150%, 175%, 200%, 250%, 300%, 350%, 400%, 450%) to about 500% or higher activity at the glucagon receptor relative to native glucagon. The amino acid sequence of native glucagon is SEQ ID NO: 701, the amino acid sequence of GLP-1(7-36)amide is SEQ ID NO: 703, and the amino acid sequence of GLP-1(7-37)acid is SEQ ID NO: 704.

[0708] The Class 3 glucagon related peptide can be a glucagon related peptide with increased or decreased activity at the glucagon receptor, or GLP-1 receptor, or both. The Class 3 glucagon related peptide can be a glucagon related peptide with altered selectivity for the glucagon receptor versus the GLP-1 receptor. As disclosed herein high potency Class 3 glucagon related peptides are provided that also exhibit improved solubility and/or stability.

### Modifications Affecting Glucagon Activity

[0709] Increased activity at the glucagon receptor is provided by an amino acid modification at position 16 of native glucagon (SEQ ID NO: 701). In some embodiments, the Class 3 glucagon related peptide is a glucagon agonist that has been modified relative to the wild type peptide of His-Ser-Gln-Gly-Thr-Phe-Thr-Ser-Asp-Tyr-Ser-Lys-Tyr-Leu-Asp-Ser-Arg-Arg-Ala-Gln-Asp-Phe-Val-Gln-Trp-Leu-Met-Asn-Thr (SEQ ID NO: 701) to enhance the peptide's potency at the glucagon receptor. The normally occurring serine at position 16 of native glucagon (SEQ ID NO: 701) can be substituted with select acidic amino acids to enhance the potency of glucagon, in terms of its ability to stimulate cAMP synthesis in a validated in vitro model assay (see Example 7). More particularly, this substitution enhances the potency of the analog at least 2-fold, 4-fold, 5-fold, and up to 10-fold greater at the glucagon receptor. This substitution also enhances the analog's activity at the GLP-1 receptor at least 5-fold, 10-fold, or 15-fold relative to native glucagon, but selectivity is maintained for the glucagon receptor over the GLP-1 receptor.

[0710] By way of nonlimiting example, such enhanced potency can be provided by substituting the naturally occurring serine at position 16 with glutamic acid or with another negatively charged amino acid having a side chain with a length of 4 atoms, or alternatively with any one of glutamine, homoglutamic acid, or homocysteic acid, or a charged amino acid having a side chain containing at least one heteroatom, (e.g. N, O, S, P) and with a side chain length of about 4 (or 3-5) atoms. In accordance with some embodiments, the serine residue at position 16 of native glucagon is substituted with an amino acid selected from the group consisting of glutamic acid, glutamine, homoglutamic acid, homocysteic acid, threonine, or glycine. In accordance with some embodiments, the serine residue at position 16 of native glucagon is substituted with an amino acid selected from the group consisting of glutamic acid, glutamine, homoglutamic acid and homocysteic acid, and in some embodiments the serine residue is substituted with glutamic acid.

[0711] In some embodiments, the enhanced potency Class 3 glucagon related peptide comprises a peptide of SEQ ID NO: 90, SEQ ID NO: 91, SEQ ID NO: 92, SEQ ID NO: 93, SEQ ID NO: 94, SEQ ID NO: 95 or a glucagon agonist analog of SEQ ID NO: 93. In accordance with some embodiments, a Class 3 glucagon related peptide having enhanced potency at the glucagon receptor relative to wild type glucagon is provided wherein the peptide comprises the sequence of SEQ ID NO: 95, SEQ ID NO: 96, SEQ ID NO: 97 or SEQ ID NO: 98, wherein the glucagon related peptide retains its selectivity for the glucagon receptor relative to the GLP-1 receptors. In some embodiments, the Class 3 glucagon related peptide having enhanced specificity for the glucagon receptor comprises the peptide of SEQ ID NO: 96, SEQ ID NO: 97, SEQ ID NO: 98 or a glucagon agonist analog thereof, wherein the carboxy terminal amino acid retains its native carboxylic acid group. In accordance with some embodiments, a Class 3 glucagon related peptide comprises the sequence of NH2-His-Ser-Gln-Gly-Thr-Phe-Thr-Ser-Asp-Tyr-Ser-Lys-Tyr-Leu-Asp-Glu-Arg-Arg-Ala-Gln-Asp-Phe-Val-Gln-Trp-Leu-Met-Asn-Thr-COOH (SEQ ID NO: 98), wherein the peptide exhibits approximately fivefold enhanced potency at the glucagon receptor, relative to native glucagon as measured by the in vitro cAMP assay of Example 7.

[0712] Glucagon receptor activity can be reduced, maintained, or enhanced by an amino acid modification at position 3, e.g. substitution of the naturally occurring glutamine at position 3. In some embodiments, substitution of the amino acid at position 3 with an acidic, basic, or hydrophobic amino acid (glutamic acid, ornithine, norleucine) has been shown to substantially reduce or destroy glucagon receptor activity. The analogs that are substituted with, for example, glutamic acid, ornithine, or norleucine have about 10% or less of the activity of native glucagon at the glucagon receptor, e.g. about 1-10%, or about 0.1-10%, or greater than about 0.1% but less than about 10%, while exhibiting at least 20% of the activity of GLP-1 at the GLP-1 receptor. For example, exemplary analogs described herein have about 0.5%, about 1% or about 7% of the activity of native glucagon, while exhibiting at least 20% of the activity of GLP-1 at the GLP-1 receptor. In particular, any of the Class 3 glucagon related peptides, including glucagon analogs, glucagon agonist analogs, glucagon co-agonists, and glucagon/GLP-1 co-agonist molecules, described herein may be modified to contain a modification at position 3, e.g., Gln substituted with Glu, to produce a peptide with high selectivity, e.g., tenfold selectivity, for the GLP-1 receptor as compared to the selectivity for the glucagon receptor.

[0713] In another embodiment, the naturally occurring glutamine at position 3 of any of the Class 3 glucagon related peptides can be substituted with a glutamine analog without a substantial loss of activity at the glucagon receptor, and in some cases, with an enhancement of glucagon receptor activity, as described herein. In specific embodiments, the amino acid at position 3 is substituted with Dab(Ac). For example, glucagon agonists can comprise the amino acid sequence of SEQ ID NO: 595, SEQ ID NO: 601 SEQ ID NO: 603, SEQ ID NO: 604, SEQ ID NO: 605, and SEQ ID NO: 606.

[0714] It was observed that modifications at position 2 (e.g. AIB at position 2) and in some cases modifications at position 1 may reduce glucagon activity. This reduction in glucagon activity can be restored by stabilizing the alpha-helix in the C-terminal portion of glucagon, e.g. through means described herein, for example, through a covalent bond between the side chains of the amino acids at positions “i” and “i+4”, e.g., 12 and 16, 16 and 20, or 20 and 24. In some embodiments, this covalent bond is a lactam bridge between a glutamic acid at position 16 and a lysine at position 20. In some embodiments, this covalent bond is an intramolecular bridge other than a lactam bridge. For example, suitable covalent bonding methods include any one or more of olefin metathesis, lanthionine-based cyclization, disulfide bridge or modified sulfur-containing bridge formation, the use of α, ω-diaminoalkane tethers, the formation of metal-atom bridges, and other means of peptide cyclization.

### Modifications Affecting GLP-1 Activity

[0715] Enhanced activity at the GLP-1 receptor is provided by replacing the carboxylic acid of the C-terminal amino acid with a charge-neutral group, such as an amide or ester. In some embodiments, these Class 3 glucagon related peptides comprise a sequence of SEQ ID NO: 108, wherein the carboxy terminal amino acid has an amide group in place of the carboxylic acid group found on the native amino acid. These Class 3 glucagon related peptides have strong activity at both the glucagon and GLP-1 receptors and thus act as co-agonists at both receptors. In accordance with some embodiments, the Class 3 glucagon related peptide is a glucagon and GLP-1 receptor co-agonist, wherein the peptide comprises the sequence of SEQ ID NO: 108, wherein the amino acid at position 28 is Asn or Lys and the amino acid at position 29 is Thr-amide.

[0716] Increased activity at the GLP-1 receptor is provided by modifications that stabilize the alpha helix in the C-terminal portion of glucagon (e.g. around residues 12-29). In some embodiments, such modifications permit formation of an intramolecular bridge between the side chains of two amino acids that are separated by three intervening amino acids (i.e., an amino acid at position “i” and an amino acid at position “i+4”, wherein i is any integer between 12 and 25), by two intervening amino acids, i.e., an amino acid at position “j” and an amino acid at position “j+3,” wherein j is any integer between 12 and 27, or by six intervening amino acids, i.e., an amino acid at position “k” and an amino acid at position “k+7,” wherein k is any integer between 12 and 22. In exemplary embodiments, the bridge or linker is about 8 (or about 7-9) atoms in length and forms between side chains of amino acids at positions 12 and 16, or at positions 16 and 20, or at positions 20 and 24, or at positions 24 and 28. The two amino acid side chains can be linked to one another through non-covalent bonds, e.g., hydrogen-bonding, ionic interactions, such as the formation of salt bridges, or by covalent bonds.

[0717] In accordance with some embodiments, the Class 3 glucagon related peptide exhibits glucagon/GLP-1 receptor co-agonist activity and comprises an amino acid sequence selected from the group consisting of SEQ ID NO: 99, 101, 102 and 103. In some embodiments, the side chains are covalently bound to one another, and in some embodiments the two amino acids are bound to one another to form a lactam ring.

[0718] In some embodiments, the Class 3 glucagon related peptide comprises a glucagon related peptide analog of SEQ ID NO: 108, wherein the peptide comprises an intramolecular lactam bridge formed between amino acid positions 12 and 16 or between amino acid positions 16 and 20. In some embodiments, the Class 3 glucagon related peptide comprises the sequence of SEQ ID NO: 108, wherein an intramolecular lactam bridge is formed between amino acid positions 12 and 16, between amino acid positions 16 and 20, or between amino acid positions 20 and 24 and the amino acid at position 29 is glycine, wherein the sequence of SEQ ID NO: 29 is linked to the C-terminal amino acid of SEQ ID NO: 108. In a further embodiment, the amino acid at position 28 is aspartic acid.

[0719] In some specific embodiments, stabilization of the alpha helix structure in the C-terminal portion of the Class 3 glucagon related peptide is achieved through the formation of an intramolecular bridge other than a lactam bridge. For example, suitable covalent bonding methods include any one or more of olefin metathesis, lanthionine-based cyclization, disulfide bridge or modified sulfur-containing bridge formation, the use of α, ω-diaminoalkane tethers, the formation of metal-atom bridges, and other means of peptide cyclization are used to stabilize the alpha helix.

[0720] Furthermore, enhanced activity at the GLP-1 receptor may be achieved by stabilizing the alpha-helix structure in the C-terminal portion of the glucagon related peptide (around amino acids 12-29) through purposeful introduction of one or more α, α-disubstituted amino acids at positions that retain the desired activity. Such peptides may be considered herein as a peptide lacking an intramolecular bridge. In some aspects, stabilization of the alpha-helix is accomplished in this manner without introduction of an intramolecular bridge such as a salt bridge or covalent bond. In some embodiments, one, two, three, four or more of positions 16, 17, 18, 19, 20, 21, 24 or 29 of a glucagon related peptide is substituted with an α, α-disubstituted amino acid. For example, substitution of position 16 of the Class 3 glucagon related peptide with aminoisobutyric acid (AIB) enhances GLP-1 activity, in the absence of a salt bridge or lactam. In some embodiments, one, two, three or more of positions 16, 20, 21 or 24 are substituted with AIB.

[0721] Enhanced activity at the GLP-1 receptor may be achieved by an amino acid modification at position 20. In some embodiments, the glutamine at position 20 is replaced with another hydrophilic amino acid having a side chain that is either charged or has an ability to hydrogen-bond, and is at least about 5 (or about 4-6) atoms in length, for example, lysine, citrulline, arginine, or ornithine.

[0722] Increased activity at the GLP-1 receptor is demonstrated in Class 3 glucagon related peptides comprising the C-terminal extension of SEQ ID NO: 78. GLP-1 activity in such Class 3 glucagon related peptides comprising SEQ ID NO: 78 can be further increased by modifying the amino acid at position 18, 28 or 29, or at position 18 and 29, as described herein. A further modest increase in GLP-1 potency may be achieved by modifying the amino acid at position 10 to be Trp.

[0723] Combinations of the modifications that increase GLP-1 receptor activity may provide higher GLP-1 activity than any of such modifications taken alone. For example, the Class 3 glucagon related peptides can comprise modifications at position 16, at position 20, and at the C-terminal carboxylic acid group, optionally with a covalent bond between the amino acids at positions 16 and 20; can comprise modifications at position 16 and at the C-terminal carboxylic acid group; can comprise modifications at positions 16 and 20, optionally with a covalent bond between the amino acids at positions 16 and 20; or can comprise modifications at position 20 and at the C-terminal carboxylic acid group; optionally with the proviso that the amino acid at position 12 is not Arg; or optionally with the proviso that the amino acid at position 9 is not Glu.

### Modifications Affecting Solubility

### Addition of Hydrophilic Moieties

[0724] The Class 3 glucagon related peptides can be further modified to improve the peptide's solubility and stability in aqueous solutions at physiological pH, while retaining the high biological activity relative to native glucagon. Hydrophilic moieties as discussed herein can be attached to the Class 3 glucagon related peptide as further discussed herein. In accordance with some embodiments, introduction of hydrophilic groups at positions 17, 21, and 24 of the Class 3 glucagon related peptide comprising SEQ ID NO: 97 or SEQ ID NO: 98 are anticipated to improve the solubility and stability of the high potency glucagon analog in solutions having a physiological pH. Introduction of such groups also increases duration of action, e.g. as measured by a prolonged half-life in circulation.

[0725] In some embodiments, the Class 3 glucagon related peptide comprises a sequence selected from the group consisting of SEQ ID NO: 99, SEQ ID NO: 100, SEQ ID NO: 101, SEQ ID NO: 102, SEQ ID NO: 103, SEQ ID NO: 104, SEQ ID NO: 105, SEQ ID NO: 106 and SEQ ID NO: 107, wherein the side chain of an amino acid residue at one of position 16, 17, 21 or 24 of said Class 3 glucagon related peptide further comprises a polyethylene glycol chain, having a molecular weight selected from the range of about 500 to about 40,000 Daltons. In some embodiments, the polyethylene glycol chain has a molecular weight selected from the range of about 500 to about 5,000 Daltons. In another embodiment. the polyethylene glycol chain has a molecular weight of about 10,000 to about 20,000 Daltons. In yet other exemplary embodiments the polyethylene glycol chain has a molecular weight of about 20,000 to about 40,000 Daltons. In accordance with some embodiments the hydrophilic group comprises a polyethylene glycol (PEG) chain. More particularly, in some embodiments, the Class 3 glucagon related peptide comprises the sequence of SEQ ID NO: 94 or SEQ ID NO: 95 wherein a PEG chain is covalently linked to the side chains of amino acids present at positions 21 and 24 of the Class 3 glucagon related peptide and the carboxy terminal amino acid of the Class 3 glucagon related peptide has the carboxylic acid group.

[0726] In accordance with some embodiments, the polyethylene glycol chain has an average molecular weight selected from the range of about 500 to about 10,000 Daltons. In accordance with some embodiments, the pegylated Class 3 glucagon related peptide comprises two or more polyethylene glycol chains covalently bound to the Class 3 glucagon related peptide wherein the total molecular weight of the glucagon chains is about 1,000 to about 5,000 Daltons. In some embodiments the pegylated glucagon agonist comprises a peptide consisting of SEQ ID NO: 93 or a glucagon agonist analog of SEQ ID NO: 93, wherein a PEG chain is covalently linked to the amino acid residue at position 21 and at position 24, and wherein the combined molecular weight of the two PEG chains is about 1,000 to about 5,000 Daltons.

### Charged C-Terminus

[0727] The solubility of the Class 3 glucagon related peptide comprising SEQ ID NO: 20 can be further improved, for example, by introducing one, two, three or more charged amino acid(s) to the C-terminal portion of glucagon related peptide of SEQ ID NO: 108, preferably at a position C-terminal to position 27. Such a charged amino acid can be introduced by substituting a native amino acid with a charged amino acid, e.g. at positions 28 or 29, or alternatively by adding a charged amino acid, e.g. after position 27, 28 or 29. In exemplary embodiments, one, two, three or all of the charged amino acids are negatively charged. Additional modifications, e.g. conservative substitutions, may be made to the Class 3 glucagon related peptide that still allow it to retain glucagon activity. In some embodiments, an analog of the Class 3 glucagon related peptide of SEQ ID NO: 108 is provided wherein the analog differs from SEQ ID NO: 108 by 1 to 2 amino acid substitutions at positions 17-26, and, in some embodiments, the analog differs from the peptide of SEQ ID NO: 108 by an amino acid substitution at position 20.

### Acylation/Alkylation

[0728] In accordance with some embodiments, the glucagon related peptide is modified to comprise an acyl or alkyl group, e.g., a C4 to C30 acyl or alkyl group. In some embodiments, the invention provides a Class 3 glucagon related peptide modified to comprise an acyl group or alkyl group covalently linked to the amino acid at position 10 of the glucagon related peptide. The glucagon related peptide may further comprise a spacer between the amino acid at position 10 of the Class 3 glucagon related peptide and the acyl group or alkyl group. Any of the foregoing Class 3 glucagon related peptides may comprise two acyl groups or two alkyl groups, or a combination thereof. In a specific aspect of the invention, the acylated Class 3 glucagon related peptide comprises the amino acid sequence of any of SEQ ID NOs: 534-544 and 546-549.

### C-Terminal Truncation

[0729] In some embodiments, the Class 3 glucagon related peptides described herein are further modified by truncation or deletion of one or two amino acids of the C-terminus of the glucagon peptide (i.e., position 29 and/or 28) without affecting activity and/or potency at the glucagon and GLP-1 receptors. In this regard, the Class 3 glucagon related peptide can comprise amino acids 1-27 or 1-28 of the native glucagon peptide (SEQ ID NO: 1), optionally with one or more modifications described herein. In some embodiments, the truncated Class 3 glucagon related peptide comprises SEQ ID NO: 550 or SEQ ID NO: 551. In another embodiment, the truncated glucagon agonist peptide comprises SEQ ID NO: 552 or SEQ ID NO: 553.

### C-Terminal Extension

[0730] In accordance with some embodiments, the Class 3 glucagon related peptides disclosed herein are modified by the addition of a second peptide to the carboxy terminus of the glucagon related peptide, for example, SEQ ID NO: 78, SEQ ID NO: 117 or SEQ ID NO: 118. In some embodiments, a Class 3 glucagon related peptide having a sequence selected from the group consisting of SEQ ID NO: 99, SEQ ID NO: 100, SEQ ID NO: 101, SEQ ID NO: 102, SEQ ID NO: 103, SEQ ID NO: 104, SEQ ID NO: 105, SEQ ID NO: 106, SEQ ID NO: 107, SEQ ID NO: 109, SEQ ID NO: 110, SEQ ID NO: 111, and SEQ ID NO: 69 is covalently bound through a peptide bond to a second peptide, wherein the second peptide comprises a sequence selected from the group consisting of SEQ ID NO: 78, SEQ ID NO: 117 and SEQ ID NO: 118. In a further embodiment, in Class 3 glucagon related peptides which comprise the C-terminal extension, the threonine at position 29 of the native glucagon related peptide is replaced with a glycine. A Class 3 glucagon related peptide having a glycine substitution for threonine at position 29 and comprising the carboxy terminal extension of SEQ ID NO: 78 is four times as potent at the GLP-1 receptor as native glucagon modified to comprise the carboxy terminal extension of SEQ ID NO: 78. Potency at the GLP-1 receptor can be further enhanced by an alanine substitution for the native arginine at position 18.

[0731] Accordingly, the Class 3 glucagon related peptide can have a carboxy terminal extension of SEQ ID NO: 117 (KRNRNNIA) or SEQ ID NO: 118. In accordance with some embodiments, Class 3 glucagon related peptide comprising SEQ ID NO: 81 or SEQ ID NO: 108, further comprises the amino acid sequence of SEQ ID NO: 117 (KRNRNNIA) or SEQ ID NO: 118 linked to amino acid 29 of the glucagon related peptide. More particularly, the Class 3 glucagon related peptide comprises a sequence selected from the group consisting of SEQ ID NO: 98, SEQ ID NO: 100, SEQ ID NO: 101, SEQ ID NO: 102 and SEQ ID NO: 103, further comprising the amino acid sequence of SEQ ID NO: 117 (KRNRNNIA) or SEQ ID NO: 118 linked to amino acid 29 of the glucagon related peptide. More particularly, the glucagon related peptide comprises a sequence selected from the group consisting of SEQ ID NO: 98, SEQ ID NO: 100, SEQ ID NO: 101, SEQ ID NO: 102, SEQ ID NO: 103, SEQ ID NO: 104, SEQ ID NO: 105, SEQ ID NO: 106, SEQ ID NO: 109, SEQ ID NO: 110, SEQ ID NO: 111, SEQ ID NO: 112, SEQ ID NO: 72 and SEQ ID NO: 120 further comprising the amino acid sequence of SEQ ID NO: 78 (GPSSGAPPPS) or SEQ ID NO: 79 linked to amino acid 29 of the Class 3 glucagon related peptide. In some embodiments, the Class 3 glucagon related peptide comprises the sequence of SEQ ID NO: 121.

[0732] Any of the modifications described above with regard to Class 3 glucagon related peptides which increase or decrease glucagon receptor activity and which increase GLP-1 receptor activity can be applied individually or in combination. Exemplary modifications include but are not limited to:

[0733] (A) Improving solubility, for example, by introducing one, two, three or more charged amino acid(s) to the C-terminal portion of native glucagon, preferably at a position C-terminal to position 27. Such a charged amino acid can be introduced by substituting a native amino acid with a charged amino acid, e.g. at positions 28 or 29, or alternatively by adding a charged amino acid, e.g. after position 27, 28 or 29. In exemplary embodiments, one, two, three or all of the charged amino acids are negatively charged. In other embodiments, one, two, three or all of the charged amino acids are positively charged. Such modifications increase solubility, e.g. provide at least 2-fold, 5-fold, 10-fold, 15-fold, 25-fold, 30-fold or greater solubility relative to native glucagon at a given pH between about 5.5 and 8, e.g., pH 7, when measured after 24 hours at 25° C.

[0734] (B) Increasing solubility and duration of action or half-life in circulation by addition of a hydrophilic moiety such as a polyethylene glycol chain, as described herein, e.g. at position 16, 17, 20, 21, 24 or 29, or at the C-terminal amino acid of the peptide.

[0735] (C) Increasing stability by modification of the aspartic acid at position 15, for example, by deletion or substitution with glutamic acid, homoglutamic acid, cysteic acid or homocysteic acid. Such modifications can reduce degradation or cleavage at a pH within the range of 5.5 to 8, especially in acidic or alkaline buffers, for example, retaining at least 75%, 80%, 90%, 95%, 96%, 97%, 98% or 99% of the original peptide after 24 hours at 25° C.

[0736] (D) Increasing stability by modification of the methionine at position 27, for example, by substitution with leucine or norleucine. Such modifications can reduce oxidative degradation. Stability can also be increased by modification of the Gln at position 20 or 24, e.g. by substitution with Ser, Thr, Ala or AIB. Such modifications can reduce degradation that occurs through deamidation of Gln. Stability can be increased by modification of Asp at position 21, e.g. by substitution with Glu. Such modifications can reduce degradation that occurs through dehydration of Asp to form a cyclic succinimide intermediate followed by isomerization to iso-aspartate.

[0737] (E) Increasing resistance to dipeptidyl peptidase IV (DPP IV) cleavage by modification of the amino acid at position 1 or 2 with the DPP-IV resistant amino acids described herein and including modification of the amino acid at position 2 with N-methyl-alanine.

[0738] (F) Conservative or non-conservative substitutions, additions or deletions that do not affect activity, for example, conservative substitutions at one or more of positions 2, 5, 7, 10, 11, 12, 13, 14, 16, 17, 18, 19, 20, 21, 24, 27, 28 or 29; deletions at one or more of positions 27, 28 or 29; or a deletion of amino acid 29 optionally combined with a C-terminal amide or ester in place of the C-terminal carboxylic acid group;

[0739] (G) Adding C-terminal extensions as described herein;

[0740] (H) Increasing half-life in circulation and/or extending the duration of action and/or delaying the onset of action, for example, through acylation or alkylation of the glucagon related peptide, as described herein;

[0741] (I) Homodimerization or heterodimerization as described herein.

[0742] Other modifications include substitution of His at position 1 with a large, aromatic amino acid (e.g., Tyr, Phe, Trp or amino-Phe); Ser at position 2 with Ala; substitution of Tyr at position 10 with Val or Phe; substitution of Lys at position 12 with Arg; substitution of Asp at position 15 with Glu; substitution of Ser at position 16 with Thr or AIB.

[0743] Class 3 glucagon related peptides with GLP-1 activity that contain a non-conservative substitution of His at position 1 with a large, aromatic amino acid (e.g., Tyr) can retain GLP-1 activity provided that the alpha-helix is stabilized via an intramolecular bridge, e.g., such as any of those described herein.

### Conjugates and Fusions

[0744] The Class 3 glucagon related peptide can be linked, optionally via covalent bonding and optionally via a linker, to a conjugate moiety. The Class 3 glucagon related peptide also can be part of a fusion peptide or protein wherein a second peptide or polypeptide has been fused to a terminus, e.g., the carboxy terminus of the Class 3 glucagon related peptide. More particularly, the fusion Class 3 glucagon related peptide may comprise a glucagon agonist of SEQ ID NO: 72, SEQ ID NO: 97 or SEQ ID NO: 98 further comprising an amino acid sequence of SEQ ID NO: 78 (GPSSGAPPPS), SEQ ID NO: 117 (KRNRNNIA) or SEQ ID NO: 118 (KRNR) linked to amino acid 29 of the glucagon related peptide. In some embodiments, the amino acid sequence of SEQ ID NO: 78 (GPSSGAPPPS), SEQ ID NO: 117 (KRNRNNIA) or SEQ ID NO: 118 (KRNR) is bound to amino acid 29 of the Class 3 glucagon related peptide through a peptide bond. Applicants have discovered that in Class 3 glucagon related peptide fusion peptides comprising the C-terminal extension peptide of Exendin-4 (e.g., SEQ ID NO: 78 or SEQ ID NO: 79), substitution of the native threonine residue at position 29 with glycine dramatically increases GLP-1 receptor activity. This amino acid substitution can be used in conjunction with other modifications disclosed herein with regard to Class 3 glucagon related peptides to enhance the affinity of the glucagon analogs for the GLP-1 receptor. For example, the T29G substitution can be combined with the S16E and N20K amino acid substitutions, optionally with a lactam bridge between amino acids 16 and 20, and optionally with addition of a PEG chain as described herein.

[0745] In some embodiments, a Class 3 glucagon related peptide comprises the sequence of SEQ ID NO: 121. In some embodiments, the Class 3 glucagon related peptide portion of the glucagon fusion peptide is selected from the group consisting of SEQ ID NO: 72, SEQ ID NO: 90, SEQ ID NO: 91, SEQ ID NO: 92, and SEQ ID NO: 93 wherein a PEG chain, when present at positions 17, 21, 24, or the C-terminal amino acid, or at both 21 and 24, is selected from the range of 500 to 40,000 Daltons. More particularly, in some embodiments, the Class 3 glucagon related peptide segment is selected from the group consisting of SEQ ID NO: 95, SEQ ID NO: 96, and SEQ ID NO: 122, wherein the PEG chain is selected from the range of 500 to 5,000. In some embodiments, the Class 3 glucagon related peptide is a fusion peptide comprising the sequence of SEQ ID NO: 72 and SEQ ID NO: 80 wherein the peptide of SEQ ID NO: 80 is linked to the carboxy terminus of SEQ ID NO: 72.

[0746] In accordance with some embodiments, an additional chemical modification of the Class 3 glucagon related peptide of SEQ ID NO: 98 bestows increased GLP-1 receptor potency to a point where the relative activity at the glucagon and GLP-1 receptors is virtually equivalent. Accordingly, in some embodiments, a Class 3 glucagon related peptide comprises a terminal amino acid comprising an amide group in place of the carboxylic acid group that is present on the native amino acid. The relative activity of the Class 3 glucagon related peptide at the respective glucagon and GLP-1 receptors can be adjusted by further modifications to the Class 3 glucagon related peptide to produce analogs demonstrating about 40% to about 500% or more of the activity of native glucagon at the glucagon receptor and about 20% to about 200% or more of the activity of native GLP-1 at the GLP-1 receptor, e.g. 50-fold, 100-fold or more increase relative to the normal activity of glucagon at the GLP-1 receptor.

### Exemplary Embodiments

[0747] In accordance with some embodiments, a glucagon analog is provided comprising the sequence of SEQ ID NO: 72, wherein said analog differs from SEQ ID NO: 72 by 1 to 3 amino acids, selected from positions 1, 2, 3, 5, 7, 10, 11, 13, 14, 17, 18, 19, 21, 24, 27, 28, and 29, wherein said glucagon related peptide exhibits at least 20% of the activity of native GLP-1 at the GLP-1 receptor.

[0748] In accordance with some embodiments a glucagon/GLP-1 receptor co-agonist is provided comprising the sequence: NH2-His-Ser-Gln-Gly-Thr-Phe-Thr-Ser-Asp-Tyr-Ser-Lys-Tyr-Leu-Xaa-Xaa-Arg-Arg-Ala-Xaa-Asp-Phe-Val-Xaa-Trp-Leu-Met-Xaa-Xaa-R (SEQ ID NO: 81) wherein the Xaa at position 15 is selected from the group of amino acids consisting of Asp, Glu, cysteic acid, homoglutamic acid and homocysteic acid, Xaa at position 16 is selected from the group of amino acids consisting of Ser, Glu, Gln, homoglutamic acid and homocysteic acid, the Xaa at position 20 is Gln or Lys, the Xaa at position 24 is Gln or Glu, the Xaa at position 28 is Asn, Lys or an acidic amino acid, the Xaa at position 29 is Thr, Gly or an acidic amino acid, and R is COOH or CONH2, with the proviso that when position 16 is serine, position 20 is Lys, or alternatively when position 16 is serine the position 24 is Glu and either position 20 or position 28 is Lys. In some embodiments the glucagon/GLP-1 receptor co-agonist comprises the sequence of SEQ ID NO: 81 wherein the amino acid at position 28 is aspartic acid and the amino acid at position 29 is glutamic acid. In another embodiment the amino acid at position 28 is the native asparagine, the amino acid at position 29 is glycine and the amino acid sequence of SEQ ID NO: 79 or SEQ ID NO: 80 is covalently linked to the carboxy terminus of SEQ ID NO: 81.

[0749] In some embodiments a co-agonist is provided comprising the sequence of SEQ ID NO: 81 wherein an additional acidic amino acid added to the carboxy terminus of the peptide. In a further embodiment the carboxy terminal amino acid of the glucagon analog has an amide in place of the carboxylic acid group of the natural amino acid. In some embodiments the glucagon analog comprises a sequence selected from the group consisting of SEQ ID NO: 85, SEQ ID NO: 86, SEQ ID NO: 87, and SEQ ID NO: 88.

[0750] In accordance with some embodiments a glucagon related peptide analog of SEQ ID NO: 81 is provided, wherein said analog differs from SEQ ID NO: 81 by 1 to 3 amino acids, selected from positions 1, 2, 3, 5, 7, 10, 11, 13, 14, 17, 18, 19, 21 and 27, with the proviso that when the amino acid at position 16 is serine, either position 20 is lysine, or a lactam bridge is formed between the amino acid at position 24 and either the amino acid at position 20 or position 28. In accordance with some embodiments the analog differs from SEQ ID NO: 81 by 1 to 3 amino acids selected from positions 1, 2, 3, 21 and 27. In some embodiments the glucagon peptide analog of SEQ ID NO: 81 differs from that sequence by 1 to 2 amino acids, or in some embodiments by a single amino acid, selected form positions 1, 2, 3, 5, 7, 10, 11, 13, 14, 17, 18, 19, 21 and 27, with the proviso that when the amino acid at position 16 is serine, either position 20 is lysine, or a lactam bridge is formed between the amino acid at position 24 and either the amino acid at position 20 or position 28.

[0751] In accordance with another embodiment a relatively selective GLP-1 receptor agonist is provided comprising the sequence NH2-His-Ser-Xaa-Gly-Thr-Phe-Thr-Ser-Asp-Tyr-Ser-Lys-Tyr-Leu-Xaa-Xaa-Arg-Arg-Ala-Xaa-Asp-Phe-Val-Xaa-Trp-Leu-Met-Xaa-Xaa-R (SEQ ID NO: 83) wherein the Xaa at position 3 is selected from the group of amino acids consisting of Glu, Orn or Nle, the Xaa at position 15 is selected from the group of amino acids consisting of Asp, Glu, cysteic acid, homoglutamic acid and homocysteic acid, Xaa at position 16 is selected from the group of amino acids consisting of Ser, Glu, Gln, homoglutamic acid and homocysteic acid, the Xaa at position 20 is Gln or Lys, the Xaa at position 24 is Gln or Glu, the Xaa at position 28 is Asn, Lys or an acidic amino acid, the Xaa at position 29 is Thr, Gly or an acidic amino acid, and R is COOH, CONH2, SEQ ID NO: 78 or SEQ ID NO: 79, with the proviso that when position 16 is serine, position 20 is Lys, or alternatively when position 16 is serine the position 24 is Glu and either position 20 or position 28 is Lys. In some embodiments the amino acid at position 3 is glutamic acid. In some embodiments the acidic amino acid substituted at position 28 and/or 29 is aspartic acid or glutamic acid.

[0752] In some embodiments the glucagon related peptide, including a co-agonist peptide, comprises the sequence of SEQ ID NO: 81 further comprising an additional acidic amino acid added to the carboxy terminus of the peptide. In a further embodiment the carboxy terminal amino acid of the glucagon analog has an amide in place of the carboxylic acid group of the natural amino acid.

[0753] In accordance with some embodiments a glucagon/GLP-1 receptor co-agonist is provided comprising a modified glucagon related peptide selected from the group consisting of: NH2-His-Ser-Gln-Gly-Thr-Phe-Thr-Ser-Asp-Tyr-Ser-Lys-Tyr-Leu-Xaa-Xaa-Arg-Arg-Ala-Xaa-Asp-Phe-Val-Xaa-Trp-Leu-Met-Xaa-Xaa-R (SEQ ID NO: 81), wherein the Xaa at position 15 is selected from the group of amino acids consisting of Asp, Glu, cysteic acid, homoglutamic acid and homocysteic acid, Xaa at position 16 is selected from the group of amino acids consisting of Ser, Glu, Gln, homoglutamic acid and homocysteic acid, the Xaa at position 20 is Gln or Lys, the Xaa at position 24 is Gln or Glu and the Xaa at position 28 is Asn, Asp or Lys, R is COOH or CONH2, the Xaa at position 29 is Thr or Gly, and R is COOH, CONH2, SEQ ID NO: 78 or SEQ ID NO: 79, with the proviso that when position 16 is serine, position 20 is Lys, or alternatively when position 16 is serine the position 24 is Glu and either position 20 or position 28 is Lys. In some embodiments R is CONH2, the Xaa at position 15 is Asp, the Xaa at position 16 is selected from the group of amino acids consisting of Glu, Gln, homoglutamic acid and homocysteic acid, the Xaas at positions 20 and 24 are each Gln the Xaa at position 28 is Asn or Asp and the Xaa at position 29 is Thr. In some embodiments the Xaas at positions 15 and 16 are each Glu, the Xaas at positions 20 and 24 are each Gln, the Xaa at position 28 is Asn or Asp, the Xaa at position 29 is Thr and R is CONH2.

[0754] It has been reported that certain positions of the native glucagon peptide can be modified while retaining at least some of the activity of the parent peptide. Accordingly, applicants anticipate that one or more of the amino acids located at positions at positions 2, 5, 7, 10, 11, 12, 13, 14, 17, 18, 19, 20, 21, 24, 27, 28 or 29 of the peptide of SEQ ID NO: 99 can be substituted with an amino acid different from that present in the native glucagon peptide, and still retain activity at the glucagon receptor. In some embodiments the methionine residue present at position 27 of the native peptide is changed to leucine or norleucine to prevent oxidative degradation of the peptide. In another embodiment the amino acid at position 20 is substituted with Lys, Arg, Ornm or Citrullene and/or position 21 is substituted with Glu, homoglutamic acid or homocysteic acid.

[0755] In some embodiments a glucagon analog of SEQ ID NO: 108 is provided wherein 1 to 6 amino acids, selected from positions 1, 2, 5, 7, 10, 11, 13, 14, 17, 18, 19, 21, 27, 28 or 29 of the analog differ from the corresponding amino acid of SEQ ID NO: 701, with the proviso that when the amino acid at position 16 is serine, position 20 is Lys, or alternatively when position 16 is serine the position 24 is Glu and either position 20 or position 28 is Lys. In accordance with another embodiment a glucagon analog of SEQ ID NO: 108 is provided wherein 1 to 3 amino acids selected from positions 1, 2, 5, 7, 10, 11, 13, 14, 17, 18, 19, 20, 21, 27, 28 or 29 of the analog differ from the corresponding amino acid of SEQ ID NO: 701. In another embodiment, a glucagon analog of SEQ ID NO: 96, SEQ ID NO: 97 or SEQ ID NO: 99 is provided wherein 1 to 2 amino acids selected from positions 1, 2, 5, 7, 10, 11, 13, 14, 17, 18, 19, 20 or 21 of the analog differ from the corresponding amino acid of SEQ ID NO: 701, and in a further embodiment the one to two differing amino acids represent conservative amino acid substitutions relative to the amino acid present in the native glucagon sequence (SEQ ID NO: 701). In some embodiments a glucagon peptide of SEQ ID NO: 100, SEQ ID NO: 101, SEQ ID NO: 102 or SEQ ID NO: 103 is provided wherein the glucagon peptide further comprises one, two or three amino acid substitutions at positions selected from positions 2, 5, 7, 10, 11, 13, 14, 17, 18, 19, 20, 21, 27 or 29. In some embodiments the substitutions at positions 2, 5, 7, 10, 11, 13, 14, 16, 17, 18, 19, 20, 21, 27 or 29 are conservative amino acid substitutions.

[0756] In accordance with some embodiments a glucagon/GLP-1 receptor co-agonist is provided comprising a variant of the sequence of SEQ ID NO 81, wherein 1 to 10 amino acids selected from positions 16, 17, 18, 20, 21, 23, 24, 27, 28 and 29, respectively, of the variant differ from the corresponding amino acid of SEQ ID NO: 701. In accordance with some embodiments a variant of the sequence of SEQ ID NO 81 is provided wherein the variant differs from SEQ ID NO: 81 by one or more amino acid substitutions selected from the group consisting of Gln17, Ala18, Glu21, Ile23, Ala24, Val27 and Gly29. In accordance with some embodiments a glucagon/GLP-1 receptor co-agonist is provided comprising variants of the sequence of SEQ ID NO 81, wherein 1 to 2 amino acids selected from positions 17-26 of the variant differ from the corresponding amino acid of SEQ ID NO: 701. In accordance with some embodiments a variant of the sequence of SEQ ID NO 81 is provided wherein the variant differs from SEQ ID NO: 81 by an amino acid substitution selected from the group consisting of Gln17, Ala18, Glu21, Ile23 and Ala24. In accordance with some embodiments a variant of the sequence of SEQ ID NO 81 is provided wherein the variant differs from SEQ ID NO: 81 by an amino acid substitution at position 18 wherein the substituted amino acid is selected from the group consisting of Ala, Ser, Thr, and Gly. In accordance with some embodiments a variant of the sequence of SEQ ID NO 81 is provided wherein the variant differs from SEQ ID NO: 81 by an amino acid substitution of Ala at position 18. Such variations are encompassed by SEQ ID NO: 72. In another embodiment a glucagon/GLP-1 receptor co-agonist is provided comprising variants of the sequence of SEQ ID NO 81, wherein 1 to 2 amino acids selected from positions 17-22 of the variant differ from the corresponding amino acid of SEQ ID NO: 701, and in a further embodiment a variant of SEQ ID NO 81 is provided wherein the variant differs from SEQ ID NO: 81 by 1 or 2 amino acid substitutions at positions 20 and 21.

[0757] In accordance with some embodiments a glucagon/GLP-1 receptor co-agonist is provided comprising the sequence: NH2-His-Ser-Gln-Gly-Thr-Phe-Thr-Ser-Asp-Tyr-Ser-Lys-Tyr-Leu-Xaa-Xaa-Arg-Arg-Ala-Xaa-Xaa-Phe-Val-Xaa-Trp-Leu-Met-Xaa-Xaa-R (SEQ ID NO: 123), wherein the Xaa at position 15 is Asp, Glu, cysteic acid, homoglutamic acid or homocysteic acid, the Xaa at position 16 is Ser, Glu, Gln, homoglutamic acid or homocysteic acid, the Xaa at position 20 is Gln, Lys, Arg, Orn or citrulline, the Xaa at position 21 is Asp, Glu, homoglutamic acid or homocysteic acid, the Xaa at position 24 is Gln or Glu, the Xaa at position 28 is Asn, Lys or an acidic amino acid, the Xaa at position 29 is Thr or an acid amino acid and R is COOH or CONH₂. In some embodiments R is CONH₂. In accordance with some embodiments a glucagon/GLP-1 receptor co-agonist is provided comprising a variant of SEQ ID NO: 99, SEQ ID NO: 100, SEQ ID NO: 101, SEQ ID NO: 102, SEQ ID NO: 103, SEQ ID NO: 114, SEQ ID NO: 115 or SEQ ID NO: 116, wherein the variant differs from said sequence by an amino acid substitution at position 20. In some embodiments the amino acid substitution is selected form the group consisting of Lys, Arg, Orn or citrulline for position 20.

[0758] In some embodiments a glucagon agonist is provided comprising an analog peptide of SEQ ID NO: 82 wherein the analog differs from SEQ ID NO: 82 by having an amino acid other than serine at position 2. In some embodiments the serine residue is substituted with aminoisobutyric acid, D-alanine, and in some embodiments the serine residue is substituted with aminoisobutyric acid. Such modifications suppresses cleavage by dipeptidyl peptidase IV while retaining the inherent potency of the parent compound (e.g. at least 75, 80, 85, 90, 95% or more of the potency of the parent compound). In some embodiments the solubility of the analog is increased, for example, by introducing one, two, three or more charged amino acid(s) to the C-terminal portion of native glucagon, preferably at a position C-terminal to position 27. In exemplary embodiments, one, two, three or all of the charged amino acids are negatively charged. In another embodiment the analog further comprises an acidic amino acid substituted for the native amino acid at position 28 or 29 or an acidic amino acid added to the carboxy terminus of the peptide of SEQ ID NO: 82.

[0759] In some embodiments the glucagon analogs disclosed herein are further modified at position 1 or 2 to reduce susceptibility to cleavage by dipeptidyl peptidase IV. In some embodiments a glucagon analog of SEQ ID NO: 97, SEQ ID NO: 99, SEQ ID NO: 100, SEQ ID NO: 101, SEQ ID NO: 102 or SEQ ID NO: 103 is provided wherein the analog differs from the parent molecule by a substitution at position 2 and exhibits reduced susceptibility (i.e., resistance) to cleavage by dipeptidyl peptidase IV. More particularly, in some embodiments position 2 of the analog peptide is substituted with an amino acid selected from the group consisting of D-serine, D-alanine, valine, amino n-butyric acid, glycine, N-methyl serine and aminoisobutyric acid. In some embodiments position 2 of the analog peptide is substituted with an amino acid selected from the group consisting of D-serine, D-alanine, glycine, N-methyl serine and aminoisobutyric acid. In another embodiment position 2 of the analog peptide is substituted with an amino acid selected from the group consisting of D-serine, glycine, N-methyl serine and aminoisobutyric acid. In some embodiments the amino acid at position 2 is not D-serine. In some embodiments the glucagon related peptide comprises the sequence of SEQ ID NO: 127 or SEQ ID NO: 128.

[0760] In some embodiments a glucagon analog of SEQ ID NO: 97, SEQ ID NO: 99, SEQ ID NO: 100, SEQ ID NO: 101, SEQ ID NO: 102 or SEQ ID NO: 103 is provided wherein the analog differs from the parent molecule by a substitution at position 1 and exhibits reduced susceptibility (i.e., resistance) to cleavage by dipeptidyl peptidase IV. More particularly, position 1 of the analog peptide is substituted with an amino acid selected from the group consisting of D-histidine, alpha, alpha-dimethyl imidiazole acetic acid (DMIA), N-methyl histidine, alpha-methyl histidine, imidazole acetic acid, desaminohistidine, hydroxyl-histidine, acetyl-histidine and homo-histidine. In another embodiment a glucagon agonist is provided comprising an analog peptide of SEQ ID NO: 82 wherein the analog differs from SEQ ID NO: 82 by having an amino acid other than histidine at position 1. In some embodiments the solubility of the analog is increased, for example, by introducing one, two, three or more charged amino acid(s) to the C-terminal portion of native glucagon, preferably at a position C-terminal to position 27. In exemplary embodiments, one, two, three or all of the charged amino acids are negatively charged. In another embodiment the analog further comprises an acidic amino acid substituted for the native amino acid at position 28 or 29 or an acidic amino acid added to the carboxy terminus of the peptide of SEQ ID NO: 82. In some embodiments the acidic amino acid is aspartic acid or glutamic acid.

[0761] In some embodiments the glucagon/GLP-1 receptor co-agonist comprises a sequence of SEQ ID NO: 108 further comprising an additional carboxy terminal extension of one amino acid or a peptide selected from the group consisting of SEQ ID NO: 78, SEQ ID NO: 117 and SEQ ID NO: 118. In the embodiment wherein a single amino acid is added to the carboxy terminus of SEQ ID NO: 108, the amino acid is typically selected from one of the 20 common amino acids, and in some embodiments the additional carboxy terminus amino acid has an amide group in place of the carboxylic acid of the native amino acid. In some embodiments the additional amino acid is selected from the group consisting of glutamic acid, aspartic acid and glycine.

[0762] In an alternative embodiment a glucagon/GLP-1 receptor co-agonist is provided wherein the peptide comprises at least one lactam ring formed between the side chain of a glutamic acid residue and a lysine residue, wherein the glutamic acid residue and a lysine residue are separated by three amino acids. In some embodiments the carboxy terminal amino acid of the lactam bearing glucagon peptide has an amide group in place of the carboxylic acid of the native amino acid. More particularly, in some embodiments a glucagon and GLP-1 co-agonist is provided comprising a modified glucagon peptide selected from the group consisting of:

[0763] NH₂-His-Ser-Gln-Gly-Thr-Phe-Thr-Ser-Asp-Tyr-Ser-Lys-Tyr-Leu-Asp-Glu-Arg-Arg-Ala-Gln-Asp-Phe-Val-Gln-Trp-Leu-Met-Xaa-Xaa-R (SEQ ID NO: 109)

[0764] NH₂-His-Ser-Gln-Gly-Thr-Phe-Thr-Ser-Asp-Tyr-Ser-Lys-Tyr-Leu-Asp-Glu-Arg-Arg-Ala-Lys-Asp-Phe-Val-Gln-Trp-Leu-Met-Xaa-Xaa-R (SEQ ID NO: 110)

[0765] NH₂-His-Ser-Gln-Gly-Thr-Phe-Thr-Ser-Asp-Tyr-Ser-Lys-Tyr-Leu-Asp-Ser-Arg-Arg-Ala-Lys-Asp-Phe-Val-Glu-Trp-Leu-Met-Xaa-Xaa-R (SEQ ID NO: 111)

[0766] NH₂-His-Ser-Gln-Gly-Thr-Phe-Thr-Ser-Asp-Tyr-Ser-Lys-Tyr-Leu-Asp-Ser-Arg-Arg-Ala-Gln-Asp-Phe-Val-Glu-Trp-Leu-Met-Lys-Xaa-R (SEQ ID NO: 112)

[0767] NH₂-His-Ser-Gln-Gly-Thr-Phe-Thr-Ser-Asp-Tyr-Ser-Lys-Tyr-Leu-Asp-Glu-Arg-Arg-Ala-Lys-Asp-Phe-Val-Glu-Trp-Leu-Met-Asn-Thr-R (SEQ ID NO: 104)

[0768] NH₂-His-Ser-Gln-Gly-Thr-Phe-Thr-Ser-Asp-Tyr-Ser-Lys-Tyr-Leu-Asp-Glu-Arg-Arg-Ala-Gln-Asp-Phe-Val-Glu-Trp-Leu-Met-Lys-Thr-R (SEQ ID NO: 105)

[0769] NH₂-His-Ser-Gln-Gly-Thr-Phe-Thr-Ser-Asp-Tyr-Ser-Lys-Tyr-Leu-Asp-Glu-Arg-Arg-Ala-Lys-Asp-Phe-Val-Glu-Trp-Leu-Met-Lys-Thr-R (SEQ ID NO: 106)

wherein Xaa at position 28=Asp, or Asn, the Xaa at position 29 is Thr or Gly, R is selected from the group consisting of COOH, CONH₂, glutamic acid, aspartic acid, glycine, SEQ ID NO: 78, SEQ ID NO: 117 and SEQ ID NO: 118, and a lactam bridge is formed between Lys at position 12 and Glu at position 16 for SEQ ID NO: 109, between Glu at position 16 and Lys at position 20 for SEQ ID NO: 110, between Lys at position 20 and Glu at position 24 for SEQ ID NO: 111, between Glu at position 24 and Lys at position 28 for SEQ ID NO: 112, between Lys at position 12 and Glu at position 16 and between Lys at position 20 and Glu at position 24 for SEQ ID NO: 104, between Lys at position 12 and Glu at position 16 and between Glu at position 24 and Lys at position 28 for SEQ ID NO: 105 and between Glu at position 16 and Lys at position 20 and between Glu at position 24 and Lys at position 28 for SEQ ID NO: 106. In some embodiments R is selected from the group consisting of COOH, CONH₂, glutamic acid, aspartic acid, glycine, the amino acid at position 28 is Asn, and the amino acid at position 29 is threonine. In some embodiments R is CONH₂, the amino acid at position 28 is Asn and the amino acid at position 29 is threonine. In another embodiment R is selected from the group consisting of SEQ ID NO: 78, SEQ ID NO: 79 and SEQ ID NO: 80 and the amino acid at position 29 is glycine.

[0770] In a further embodiment the glucagon/GLP-1 receptor co-agonist is selected from the group consisting of SEQ ID NO: 99, SEQ ID NO: 100, SEQ ID NO: 101, SEQ ID NO: 102, SEQ ID NO: 103, SEQ ID NO: 104, SEQ ID NO: 105 and SEQ ID NO: 106, wherein the peptide further comprises an additional carboxy terminal extension of one amino acid or a peptide selected from the group consisting of SEQ ID NO: 78, SEQ ID NO: 117 and SEQ ID NO: 118. In some embodiments the terminal extension comprises the sequence of SEQ ID NO: 78, SEQ ID NO: 79 or SEQ ID NO: 80 and the glucagon related peptide comprises the sequence of SEQ ID NO: 72. In some embodiments the glucagon/GLP-1 receptor co-agonist comprises the sequence of SEQ ID NO: 81 wherein the amino acid at position 16 is glutamic acid, the amino acid at position 20 is lysine, the amino acid at position 28 is asparagine and the amino acid sequence of SEQ ID No: 78 or SEQ ID NO: 79 is linked to the carboxy terminus of SEQ ID NO: 81.

[0771] In the embodiment wherein a single amino acid is added to the carboxy terminus of SEQ ID NO: 108, the amino acid is typically selected from one of the 20 common amino acids, and in some embodiments the amino acid has an amide group in place of the carboxylic acid of the native amino acid. In some embodiments the additional amino acid is selected from the group consisting of glutamic acid and aspartic acid and glycine. In the embodiments wherein the glucagon agonist analog further comprises a carboxy terminal extension, the carboxy terminal amino acid of the extension, in some embodiments, ends in an amide group or an ester group rather than a carboxylic acid.

[0772] In another embodiment the glucagon/GLP-1 receptor co-agonist comprises the sequence: NH₂-His-Ser-Gln-Gly-Thr-Phe-Thr-Ser-Asp-Tyr-Ser-Lys-Tyr-Leu-Asp-Glu-Arg-Arg-Ala-Gln-Asp-Phe-Val-Gln-Trp-Leu-Met-Asn-Thr-Xaa-CONH₂ (SEQ ID NO: 107), wherein the Xaa at position 30 represents any amino acid. In some embodiments Xaa is selected from one of the 20 common amino acids, and in some embodiments the amino acid is glutamic acid, aspartic acid or glycine. The solubility of this peptide can be further improved by covalently linking a PEG chain to the side chain of amino acid at position 17, 21, 24 or 30 of SEQ ID NO: 107. In a further embodiment the peptide comprises an additional carboxy terminal extension of a peptide selected from the group consisting of SEQ ID NO: 78, SEQ ID NO: 117 and SEQ ID NO: 118. In accordance with some embodiments the glucagon/GLP-1 receptor co-agonist comprises the sequence of SEQ ID NO: 129, SEQ ID NO: 130 and SEQ ID NO: 131.

[0773] Additional site specific modifications internal to the glucagon sequence of SEQ ID NO: 99, SEQ ID NO: 100, SEQ ID NO: 101, SEQ ID NO: 102, SEQ ID NO: 103, SEQ ID NO: 104, SEQ ID NO: 105, SEQ ID NO: 106, SEQ ID NO: 107 and SEQ ID NO: 121 can be made to yield a set of glucagon agonists that possess variable degrees of GLP-1 agonism. Accordingly, peptides that possess virtually identical in vitro potency at each receptor have been prepared and characterized. Similarly, peptides with tenfold selectively enhanced potency at each of the two receptors have been identified and characterized. As noted above substitution of the serine residue at position 16 with glutamic acid enhances the potency of native glucagon at both the Glucagon and GLP-1 receptors, but maintains approximately a tenfold selectivity for the glucagon receptor. In addition by substituting the native glutamine at position 3 with glutamic acid (SEQ ID NO: 128) generates a glucagon analog that exhibits approximately a tenfold selectivity for the GLP-1 receptor.

[0774] The solubility of the glucagon/GLP-1 co-agonist peptides can be further enhanced in aqueous solutions at physiological pH, while retaining the high biological activity relative to native glucagon by the introduction of hydrophilic groups at positions 16, 17, 21, and 24 of the peptide, or by the addition of a single modified amino acid (i.e., an amino acid modified to comprise a hydrophilic group) at the carboxy terminus of the glucagon/GLP-1 co-agonist peptide. In accordance with some embodiments the hydrophilic group comprises a polyethylene (PEG) chain. More particularly, in some embodiments the glucagon peptide comprises the sequence of SEQ ID NO: 98, SEQ ID NO: 99, SEQ ID NO: 100, SEQ ID NO: 101, SEQ ID NO: 102, SEQ ID NO: 103, SEQ ID NO: 104, SEQ ID NO: 105 or SEQ ID NO: 106 wherein a PEG chain is covalently linked to the side chain of an amino acids at position 16, 17, 21, 24, 29 or the C-terminal amino acid of the glucagon peptide, with the proviso that when the peptide comprises SEQ ID NO: 98, SEQ ID NO: 99, SEQ ID NO: 100 or SEQ ID NO: 101 the polyethylene glycol chain is covalently bound to an amino acid residue at position 17, 21 or 24, when the peptide comprises SEQ ID NO: 102 or SEQ ID NO: 103 the polyethylene glycol chain is covalently bound to an amino acid residue at position 16, 17 or 21, and when the peptide comprises SEQ ID NO: 104, SEQ ID NO: 105 or SEQ ID NO: 106 the polyethylene glycol chain is covalently bound to an amino acid residue at position 17 or 21.

[0775] In some embodiments the glucagon peptide comprises the sequence of SEQ ID NO: 99, SEQ ID NO: 100 or SEQ ID NO: 101, wherein a PEG chain is covalently linked to the side chain of an amino acids at position 17, 21, 24, or the C-terminal amino acid of the glucagon peptide, and the carboxy terminal amino acid of the peptide has an amide group in place of the carboxylic acid group of the native amino acid. In some embodiments the glucagon/GLP-1 receptor co-agonist peptide comprises a sequence selected from the group consisting of SEQ ID NO: 100, SEQ ID NO: 101, SEQ ID NO: 102, SEQ ID NO: 103, SEQ ID NO: 104, SEQ ID NO: 105, SEQ ID NO: 106 and SEQ ID NO: 107, wherein a PEG chain is covalently linked to the side chain of an amino acid at position 17, 21 or 24 of SEQ ID NO: 100, SEQ ID NO: 101 and SEQ ID NO: 107, or at position 16, 17 or 21 of SEQ ID NO: 102 and SEQ ID NO: 103 or at position 17 or 21 of SEQ ID NO: 104, SEQ ID NO: 105 and SEQ ID NO: 106 of the glucagon peptide. In another embodiment the glucagon/GLP-1 receptor co-agonist peptide comprises the sequence of SEQ ID NO: 99 or SEQ ID NO: 107, wherein a PEG chain is covalently linked to the side chain of an amino acids at position 17, 21 or 24 or the C-terminal amino acid of the glucagon peptide.

[0776] In some embodiments a glucagon peptide selected from the group consisting of SEQ ID NO: 100, SEQ ID NO: 101, SEQ ID NO: 102, SEQ ID NO: 103, SEQ ID NO: 104, SEQ ID NO: 105, SEQ ID NO: 106, and SEQ ID NO: 107 is further modified to comprise a PEG chain covalently linked to the side chain of an amino acid at position 17 or 21 of the glucagon peptide. In some embodiments the pegylated glucagon/GLP-1 receptor co-agonist further comprises the sequence of SEQ ID NO: 78, SEQ ID NO: 117 or SEQ ID NO: 79.

[0777] In another embodiment the glucagon related peptide comprises the sequence of SEQ ID NO: 72 or SEQ ID NO: 120, further comprising a C-terminal extension of SEQ ID NO: 78, SEQ ID NO: 79 or SEQ ID NO: 80 linked to the C-terminal amino acid of SEQ ID NO: 72 or SEQ ID NO: 120, and optionally further comprising a PEG chain covalently linked to the side chain of an amino acids at position 17, 18, 21, 24 or 29 or the C-terminal amino acid of the peptide. In another embodiment the glucagon related peptide comprises the sequence of SEQ ID NO: 72 or SEQ ID NO: 120, wherein a PEG chain is covalently linked to the side chain of an amino acids at position 21 or 24 of the glucagon related peptide and the peptide further comprises a C-terminal extension of SEQ ID NO: 78, or SEQ ID NO: 79.

[0778] In another embodiment the glucagon related peptide comprises the sequence of SEQ ID NO: 72, or SEQ ID NO: 81 or SEQ ID NO: 82, wherein an additional amino acid is added to the carboxy terminus of SEQ ID NO: 81 or SEQ ID NO: 82, and a PEG chain is covalently linked to the side chain of the added amino acid. In a further embodiment, the pegylated glucagon analog further comprises a C-terminal extension of SEQ ID NO: 78 or SEQ ID NO: 79 linked to the C-terminal amino acid of SEQ ID NO: 81 or SEQ ID NO: 82. In another embodiment the glucagon related peptide comprises the sequence of SEQ ID NO: 107, wherein a PEG chain is covalently linked to the side chain of the amino acid at position 30 of the glucagon related peptide and the peptide further comprises a C-terminal extension of SEQ ID NO: 78 or SEQ ID NO: 79 linked to the C-terminal amino acid of SEQ ID NO: 107.

[0779] The polyethylene glycol chain may be in the form of a straight chain or it may be branched. In accordance with some embodiments the polyethylene glycol chain has an average molecular weight selected from the range of about 500 to about 10,000 Daltons. In some embodiments the polyethylene glycol chain has an average molecular weight selected from the range of about 1,000 to about 5,000 Daltons. In an alternative embodiment the polyethylene glycol chain has an average molecular weight selected from the range of about 10,000 to about 20,000 Daltons. In accordance with some embodiments the pegylated glucagon related peptide comprises two or more polyethylene glycol chains covalently bound to the glucagon related peptide wherein the total molecular weight of the glucagon chains is about 1,000 to about 5,000 Daltons. In some embodiments the pegylated glucagon agonist comprises a peptide consisting of SEQ ID NO: 93 or a glucagon agonist analog of SEQ ID NO: 93, wherein a PEG chain is covalently linked to the amino acid residue at position 21 and at position 24, and wherein the combined molecular weight of the two PEG chains is about 1,000 to about 5,000 Daltons.

[0780] In certain exemplary embodiments, the glucagon peptide comprises the amino acid sequence of SEQ ID NO: 701 with up to ten amino acid modifications and comprises an amino acid at position 10 which is acylated or alkylated. In some embodiments, the amino acid at position 10 is acylated or alkylated with a C4 to C30 fatty acid. In certain aspects, the amino acid at position 10 comprises an acyl group or an alkyl group which is non-native to a naturally-occurring amino acid.

[0781] In certain embodiments, the glucagon peptide comprising an amino acid at position 10 which is acylated or alkylated comprises a stabilized alpha helix. Accordingly, in certain aspects, the glucagon peptide comprises an acyl or alkyl group as described herein and an intramolecular bridge, e.g., a covalent intramolecular bridge (e.g., a lactam bridge) between the side chains of an amino acid at position i and an amino acid at position i+4, wherein i is 12, 16, 20, or 24. Alternatively or additionally, the glucagon peptide comprises an acyl or alkyl group as described herein and one, two, three or more of positions 16, 20, 21 and/or 24 of the glucagon peptide are substituted with an α, α-disubstituted amino acid, e.g., AIB. In some instances, the non-native glucagon peptide comprises Glu at position 16 and Lys at position 20, wherein optionally a lactam bridge links the Glu and the Lys, and, optionally, the glucagon peptide further comprises one or more modifications selected from the group consisting of: Gln at position 17, Ala at position 18, Glu at position 21, Ile at position 23, and Ala at position 24.

[0782] Also, in any of the embodiments, wherein the glucagon related peptide comprises an amino acid at position 10 which is acylated or alkylated, the glucagon related peptide can further comprise a C-terminal amide in lieu of the C-terminal alpha carboxylate.

[0783] In some embodiments, the glucagon related peptide comprising an acyl or alkyl group as described herein further comprises an amino acid substitution at position 1, at position 2, or at positions 1 and 2, wherein the amino acid substitution(s) achieve DPP-IV protease resistance. In certain specific embodiments, the glucagon related peptide is one which comprises SEQ ID NOs: 72 with an amino acid at position 10 acylated or alkylated as described herein. The acyl or alkyl group of these embodiments may be any acyl or alkyl group described herein. For example, the acyl group may be a C4 to C30 (e.g., C8 to C24) fatty acyl group and the alkyl group may be a C4 to C30 (e.g., C8 to C24) alkyl group.

[0784] The amino acid to which the acyl or alkyl group is attached may be any of the amino acids described herein, e.g., an amino acid of any of Formula I (e.g., Lys), Formula II, and Formula III.

[0785] In some embodiments, the acyl group or alkyl group is directly attached to the amino acid at position 10. In some embodiments, the acyl or alkyl group is attached to the amino acid at position 10 via a spacer, such as, for example, a spacer which is 3 to 10 atoms in length, e.g., an amino acid or dipeptide. Suitable spacers for purposes of attaching an acyl or alkyl group are described herein.

[0786] In certain aspects, the glucagon analogs comprise at least one amino acid modification and up to 15 amino acid modifications (e.g., 1, 2, 3, 4, 5, 6, 7, 8, 9, 10, 11, 12, 13, 14, 15 amino acid modifications), or up to 10 amino acid modifications. In certain embodiments, the analogs comprising at least one amino acid modification and up to 10 amino acid modifications represent conservative amino acid modifications. Conservative amino acid modifications are described herein.

[0787] Accordingly, in some aspects, the glucagon analog comprises the amino acid sequence of SEQ ID NO: 701 with one or more of: Gln at position 17, Ala at position 18, Glu at position 21, Ile at position 23, and Ala or Cys at position 24, or conservative amino acid substitutions thereof. In some aspects, the analog comprises a C-terminal amide in place of the C-terminal alpha carboxylate. In certain embodiments, the analog comprises an amino acid substitution at position 1, position 2, or positions 1 and 2, which substitution(s) achieve DPP-IV protease resistance. Suitable amino acid substitutions are described herein. For example, DMIA at position 1 and/or d-Ser or AIB at position 2. In some embodiments, the amino acid at position 2 is not D-serine.

[0788] Additionally or alternatively, the analog may comprise one or a combination of: (a) Ser at position 2 substituted with Ala; (b) Gln at position 3 substituted with Glu or a glutamine analog; (c) Thr at position 7 substituted with a Ile; (d) Tyr at position 10 substituted with Trp or an amino acid comprising an acyl or alkyl group which is non-native to a naturally-occurring amino acid; (e) Lys at position 12 substituted with Ile; (f) Asp at position 15 substituted with Glu; (g) Ser at position 16 substituted with Glu; (h) Gln at position 20 substituted with Ser, Thr, Ala, AIB; (i) Gln at position 24 substituted with Ser, Thr, Ala, AIB; (j) Met at position 27 substituted with Leu or Nle; (k) Asn at position 29 substituted with a charged amino acid, optionally, Asp or Glu; and (1) Thr at position 29 substituted with Gly or a charged amino acid, optionally, Asp or Glu. In certain aspects, the analog comprises the amino acid sequence of any of SEQ ID NOs: 657-669.

[0789] With regard to the analogs which exhibit agonist activity at the GIP receptor, the analog comprises an extension of 1-21 amino acids (e.g., 5-19, 7-15, 9-12 amino acids). The extension of the analog may comprise any amino acid sequence, provided that the extension is 1 to 21 amino acids. In some aspects, the extension is 7 to 15 amino acids and in other aspects, the extension is 9 to 12 amino acids. In some embodiments, the extension comprises (i) the amino acid sequence of SEQ ID NO: 78 or 674, (ii) an amino acid sequence which has high sequence identity (e.g., at least 80%, 85%, 90%, 95%, 98%, 99%) with the amino acid sequence of SEQ ID NO: 78 or 674, or (iii) the amino acid sequence of (i) or (ii) with one or more conservative amino acid modifications.

[0790] In some embodiments, at least one of the amino acids of the extension is acylated or alkylated. The amino acid comprising the acyl or alkyl group may be located at any position of extension of the analog. In certain embodiments, the acylated or alkylated amino acid of the extension is located at one of positions 37, 38, 39, 40, 41, or 42 (according to the numbering of SEQ ID NO: 701) of the analog. In certain embodiments, the acylated or alkylated amino acid is located at position 40 of the analog.

[0791] In exemplary embodiments, the acyl or alkyl group is an acyl or alkyl group which is non-native to a naturally-occurring amino acid. For example, the acyl or alkyl group may be a C4 to C30 (e.g., C12 to C18) fatty acyl group or C4 to C30 (e.g., C12 to C18) alkyl. The acyl or alkyl group may be any of those discussed herein.

[0792] In some embodiments, the acyl or alkyl group is attached directly to the amino acid, e.g., via the side chain of the amino acid. In other embodiments, the acyl or alkyl group is attached to the amino acid via a spacer (e.g., an amino acid, a dipeptide, a tripeptide, a hydrophilic bifunctional spacer, a hydrophobic bifunctional spacer). In certain aspects, the spacer is 3 to 10 atoms in length. In some embodiments, the amino acid spacer is not γ-Glu. In some embodiments, the dipeptide spacer is not γ-Glu-γ-Glu.

[0793] Also, in exemplary embodiments, the amino acid to which the acyl or alkyl group is attached may be any of those described herein, including, for example, an amino acid of Formula I, II, or III. The amino acid which is acylated or alkylated may be a Lys, for example. Suitable amino acids comprising an acyl or alkyl group, as well as suitable acyl groups and alkyl groups, are described herein. See, for example, the teachings under the sections entitled Acylation and Alkylation.

[0794] In other embodiments, 1-6 amino acids (e.g., 1-2, 1-3, 1-4, 1-5 amino acids) of the extension are positive-charged amino acids, e.g., amino acids of Formula IV, such as, for example, Lys. As used herein, the term “positive-charged amino acid” refers to any amino acid, naturally-occurring or non-naturally occurring, comprising a positive charge on an atom of its side chain at a physiological pH. In certain aspects, the positive-charged amino acids are located at any of positions 37, 38, 39, 40, 41, 42, and 43. In specific embodiments, a positive-charged amino acid is located at position 40. In other instances, the extension is acylated or alkylated as described herein and comprises 1-6 positive charged amino acids as described herein.

[0795] In yet other embodiments, the analogs which exhibit agonist activity at the GIP receptor comprises (i) SEQ ID NO: 701 with at least one amino acid modification, (ii) an extension of 1 to 21 amino acids (e.g., 5 to 18, 7 to 15, 9 to 12 amino acids) C-terminal to the amino acid at position 29 of the analog, and (iii) an amino acid comprising an acyl or alkyl group which is non-native to a naturally-occurring amino acid which is located outside of the C-terminal extension (e.g., at any of positions 1-29). In some embodiments, the analog comprises an acylated or alkylated amino acid at position 10. In particular aspects, the acyl or alkyl group is a C4 to C30 fatty acyl or C4 to C30 alkyl group. In some embodiments, the acyl or alkyl group is attached via a spacer, e.g., an amino acid, dipeptide, tripeptide, hydrophilic bifunctional spacer, hydrophobic bifunctional spacer). In certain aspects, the analog comprises an amino acid modification which stabilizes the alpha helix, such as a salt bridge between a Glu at position 16 and a Lys at position 20, or an alpha, alpha-disubstituted amino acid at any one, two, three, or more of positions 16, 20, 21, and 24. In specific aspects, the analog additionally comprises amino acid modifications which confer DPP-IV protease resistance, e.g., DMIA at position 1, AIB at position 2. Analogs comprising further amino acid modifications are contemplated herein. In one embodiment the Class 3 glucagon related peptide comprises the structures of any of SEQ ID NOs: 657-669.

[0796] In accordance with some embodiments, the Class 3 glucagon related peptide comprises the amino acid sequence of native glucagon (SEQ ID NO: 701) comprising the following modifications: AIB at position 2, Glu at position 3, Lys at position 10, Glu at position 16, Gln at position 17, Ala at position 18, Lys at position 20, Glu at position 21, Ile at position 23, Ala at position 24; wherein Lys at position 10 is acylated with a C14 or C16 fatty acid, and wherein the C-terminal carboxylate is replaced with an amide. In a specific embodiment, this Class 3 glucagon related peptide is attached via its N-terminal amino acid to the dipeptide D-Lys-Sarcosine.

[0797] In accordance with some embodiments, the Class 3 glucagon related peptide comprises, consists essentially of, or consists of an amino acid sequence of any of SEQ ID NOs: 514, 517-534, or 554, optionally with up to 1, 2, 3, 4, or 5 further modifications that retain GLP-1 agonist and/or glucagon agonist activity. In certain embodiments, the Class 3 glucagon related peptide comprises the amino acids of any of SEQ ID NOs: 562-684, and 1701-1776. In some embodiments, the Class 3 glucagon related peptide comprises the amino acid sequences of any of SEQ ID NOs: 1801-1908.

[0798] The disclosed incretin-insulin peptide conjugates are believed to be suitable for any use that has previously been described for insulin peptides or for glucagon related peptides, including the use to reduce weight or prevent weight gain. Accordingly, the incretin-insulin conjugates described herein can be used to treat hyperglycemia, or treat other metabolic diseases that result from high blood glucose levels. Accordingly, the present invention encompasses pharmaceutical compositions comprising a incretin-insulin conjugate as disclosed herein and a pharmaceutically acceptable carrier for use in treating a patient suffering from high blood glucose levels. In accordance with one embodiment the patient to be treated using an incretin-insulin conjugate disclosed herein is a domesticated animal, and in another embodiment the patient to be treated is a human.

[0799] One method of treating hyperglycemia in accordance with the present disclosure comprises the steps of administering the presently disclosed incretin-insulin conjugate to a patient using any standard route of administration, including parenterally, such as intravenously, intraperitoneally, subcutaneously or intramuscularly, intrathecally, transdermally, rectally, orally, nasally or by inhalation. In one embodiment the composition is administered subcutaneously or intramuscularly. In one embodiment, the composition is administered parenterally and the incretin-insulin conjugate is prepackaged in a syringe.

[0800] The incretin-insulin conjugate disclosed herein may be administered alone or in combination with other anti-diabetic agents. Anti-diabetic agents known in the art or under investigation include native insulin, native glucagon and functional analogs thereof, sulfonylureas, such as tolbutamide (Orinase), acetohexamide (Dymelor), tolazamide (Tolinase), chlorpropamide (Diabinese), glipizide (Glucotrol), glyburide (Diabeta, Micronase, Glynase), glimepiride (Amaryl), or gliclazide (Diamicron); meglitinides, such as repaglinide (Prandin) or nateglinide (Starlix); biguanides such as metformin (Glucophage) or phenformin; thiazolidinediones such as rosiglitazone (Avandia), pioglitazone (Actos), or troglitazone (Rezulin), or other PPARy inhibitors; alpha glucosidase inhibitors that inhibit carbohydrate digestion, such as miglitol (Glyset), acarbose (Precose/Glucobay); exenatide (Byetta) or pramlintide; Dipeptidyl peptidase-4 (DPP-4) inhibitors such as vildagliptin or sitagliptin; SGLT (sodium-dependent glucose transporter 1) inhibitors; or FBPase (fructose 1,6-bisphosphatase) inhibitors.

[0801] Pharmaceutical compositions comprising the incretin-insulin conjugates disclosed herein can be formulated and administered to patients using standard pharmaceutically acceptable carriers and routes of administration known to those skilled in the art. Accordingly, the present disclosure also encompasses pharmaceutical compositions comprising one or more of the incretin-insulin conjugates disclosed herein or a pharmaceutically acceptable salt thereof, in combination with a pharmaceutically acceptable carrier. In one embodiment the pharmaceutical composition comprises a 1 mg/ml concentration of the incretin-insulin conjugate at a pH of about 4.0 to about 7.0 in a phosphate buffer system. The pharmaceutical compositions may comprise the incretin-insulin conjugate as the sole pharmaceutically active component, or the incretin-insulin conjugate peptide can be combined with one or more additional active agents.

[0802] All therapeutic methods, pharmaceutical compositions, kits and other similar embodiments described herein contemplate that incretin-insulin conjugate peptides include all pharmaceutically acceptable salts thereof.

[0803] In one embodiment the kit is provided with a device for administering the incretin-insulin conjugate to a patient. The kit may further include a variety of containers, e.g., vials, tubes, bottles, and the like. Preferably, the kits will also include instructions for use. In accordance with one embodiment the device of the kit is an aerosol dispensing device, wherein the composition is prepackaged within the aerosol device. In another embodiment the kit comprises a syringe and a needle, and in one embodiment the incretin-insulin conjugate composition is prepackaged within the syringe.

[0804] The compounds of this invention may be prepared by standard synthetic methods, recombinant DNA techniques, or any other methods of preparing peptides and fusion proteins. Although certain non-natural amino acids cannot be expressed by standard recombinant DNA techniques, techniques for their preparation are known in the art. Compounds of this invention that encompass non-peptide portions may be synthesized by standard organic chemistry reactions, in addition to standard peptide chemistry reactions when applicable.

[0805] Any of the modifications to the incretin peptide or insulin peptide as described above which increase or decrease incretin or insulin receptor activity can be applied individually or in combination. In addition each of the disclosed linear chain spacers disclosed herein can be used in combination with any incretin or insulin to form increlins in accordance with the present disclosure. Any of the modifications described above can also be combined with other modifications that confer other desirable properties, such as increased solubility and/or stability and/or duration of action

### Example 1

[0806] Synthesis of Insulin A & B Chains

[0807] Insulin A & B chains were synthesized on 4-methylbenzhyryl amine (MBHA) resin or 4-Hydroxymethyl-phenylacetamidomethyl (PAM) resin using Boc chemistry. The peptides were cleaved from the resin using HF/p-cresol 95:5 for 1 hour at 0° C. Following HF removal and ether precipitation, peptides were dissolved into 50% aqueous acetic acid and lyophilized. Alternatively, peptides were synthesized using Fmoc chemistry. The peptides were cleaved from the resin using Trifluoroacetic acid (TFA)/Triisopropylsilane (TIS)/H₂O (95:2.5:2.5), for 2 hour at room temperature. The peptide was precipitated through the addition of an excessive amount of diethyl ether and the pellet solubilized in aqueous acidic buffer. The quality of peptides were monitored by RP-HPLC and confirmed by Mass Spectrometry (ESI or MALDI).

[0808] Insulin A chains were synthesized with a single free cysteine at amino acid 7 and all other cysteines protected as acetamidomethyl A-(SH)⁷(Acm)^{6,11,20}. Insulin B chains were synthesized with a single free cysteine at position 7 and the other cysteine protected as acetamidomethyl B—(SH)⁷(Acm)¹⁹. The crude peptides were purified by conventional RP-HPLC.

[0809] The synthesized A and B chains were linked to one another through their native disulfide bond linkage as previously disclosed in US-2011-0257076, the disclosure of which is incorporated herein by reference. The respective B chain was activated to the Cys⁷-Npys derivative through dissolution in DMF or DMSO and reacted with 2,2′-Dithiobis (5-nitropyridine) (Npys) at a 1:1 molar ratio, at room temperature. The activation was monitored by RP-HPLC and the product was confirmed by ESI-MS.

[0810] The first B7-A7 disulfide bond was formed by dissolution of the respective A-(SH)⁷(Acm)^{6,11,20} and B-(Npys)⁷(Acm)¹⁹ at 1:1 molar ratio to a total peptide concentration of 10 mg/ml. When the chain combination reaction was complete the mixture was diluted to a concentration of 50% aqueous acetic acid. The last two disulfide bonds were formed simultaneously through the addition of iodine. A 40 fold molar excess of iodine was added to the solution and the mixture was stirred at room temperature for an additional hour. The reaction was terminated by the addition of an aqueous ascorbic acid solution. The mixture was purified by RP-HPLC and the final compound was confirmed by MALDI-MS. As shown in the data in Table 1, the synthetic insulin prepared in accordance with this procedure compares well with purified insulin for insulin receptor binding.

[0811] Insulin peptides comprising a modified amino acid (such as 4-amino phenylalanine at position A19) can also be synthesized in vivo using a system that allows for incorporation of non-coded amino acids into proteins, including for example, the system taught in U.S. Pat. Nos. 7,045,337 and 7,083,970.

TABLE 1
Activity of synthesized insulin relative to native insulin

| | Insulin Standard | | A7-B7 Insulin | |
|---|---|---|---|---|
| | AVER. | STDEV | AVER. | STDEV |
| IC₅₀(nM) | 0.24 | 0.07 | 0.13 | 0.08 |
| % of Insulin Activity | 100 | | 176.9 | |

### Example 2

### Pegylation of Amine Groups (N-Terminus and Lysine) by Reductive Alkylation

[0812] a. Synthesis

[0813] Insulin (or an insulin analog), mPEG20 k—Aldyhyde, and NaBH₃CN, in a molar ratio of 1:2:30, were dissolved in acetic acid buffer at a pH of 4.1-4.4. The reaction solution was composed of 0.1 N NaCl, 0.2 N acetic acid and 0.1 N Na₂CO₃. The insulin peptide concentration was approximately 0.5 mg/ml. The reaction occurs over six hours at room temperature. The degree of reaction was monitored by RP-HPLC and the yield of the reaction was approximately 50%.

[0814] b. Purification

[0815] The reaction mixture was diluted 2-5 fold with 0.1% TFA and applied to a preparative RP-HPLC column. HPLC condition: C4 column; flow rate 10 ml/min; A buffer 10% ACN and 0.1% TFA in water; B buffer 0.1% TFA in ACN; A linear gradient B % from 0-40% (0-80 min); PEG-insulin or analogues was eluted at approximately 35% buffer B. The desired compounds were verified by MALDI-TOF, following chemical modification through sulftolysis or trypsin degradation.

### Pegylation of Amine Groups (N-Terminus and Lysine) by N-Hydroxysuccinimide Acylation.

[0816] a. Synthesis

[0817] Insulin (or an insulin analog) along with mPEG20 k—NHS were dissolved in 0.1 N Bicine buffer (pH 8.0) at a molar ratio of 1:1. The insulin peptide concentration was approximately 0.5 mg/ml. Reaction progress was monitored by HPLC. The yield of the reaction is approximately 90% after 2 hours at room temperature.

[0818] b. Purification

[0819] The reaction mixture was diluted 2-5 fold and loaded to RP-HPLC.

[0820] HPLC condition: C4 column; flow rate 10 ml/min; A buffer 10% ACN and 0.1% TFA in water; B buffer 0.1% TFA in ACN; A linear gradient B % from 0-40% (0-80 min); PEG-insulin or analogues was collected at approximately 35% B. The desired compounds were verified by MAIDI-TOF, following chemical modification through sulftolysis or trypsin degradation.

### Reductive Aminated Pegylation of Acetyl Group on the Aromatic Ring of the Phenylalanine

[0821] a. Synthesis

[0822] Insulin (or an insulin analogue), mPEG20 k—Hydrazide, and NaBH₃CN in a molar ratio of 1:2:20 were dissolved in acetic acid buffer (pH of 4.1 to 4.4). The reaction solution was composed of 0.1 N NaCl, 0.2 N acetic acid and 0.1 N Na₂CO₃. Insulin or insulin analogue concentration was approximately 0.5 mg/ml. at room temperature for 24 h. The reaction process was monitored by HPLC. The conversion of the reaction was approximately 50%. (calculated by HPLC)

[0823] b. Purification

[0824] The reaction mixture was diluted 2-5 fold and loaded to RP-HPLC.

[0825] HPLC condition: C4 column; flow rate 10 ml/min; A buffer 10% ACN and 0.1% TFA in water; B buffer 0.1% TFA in ACN; A linear gradient B % from 0-40% (0-80 min); PEG-insulin, or the PEG-insulin analogue was collected at approximately 35% B. The desired compounds were verified by MAIDI-TOF, following chemical modification through sulftolysis or trypsin degradation.

### Example 3

### Incretin General Synthesis Protocol:

[0826] Glucagon analogs were synthesized using HBTU-activated “Fast Boc” single coupling starting from 0.2 mmole of Boc Thr(OBzl)Pam resin on a modified Applied Biosystem 430 A peptide synthesizer. Boc amino acids and HBTU were obtained from Midwest Biotech (Fishers, Ind.). Side chain protecting groups used were: Arg(Tos), Asn(Xan), Asp(OcHex), Cys(pMeBzl), His(Bom), Lys(2C1—Z), Ser(OBzl), Thr(OBzl), Tyr(2Br—Z), and Trp(CHO). The side-chain protecting group on the N-terminal His was Boc.

[0827] Each completed peptidyl resin was treated with a solution of 20% piperdine in dimethylformamide to remove the formyl group from the tryptophan. Liquid hydrogen fluoride cleavages were performed in the presence of p-cresol and dimethyl sulfide. The cleavage was run for 1 hour in an ice bath using an HF apparatus (Penninsula Labs). After evaporation of the HF, the residue was suspended in diethyl ether and the solid materials were filtered. Each peptide was extracted into 30-70 ml aqueous acetic acid and a diluted aliquot was analyzed by HPLC [Beckman System Gold, 0.46×5 cm Zorbax C8, 1 ml/min, 45 C, 214 nm, A buffer=0.1% TFA, B=0.1% TFA/90% acetonitrile, gradient of 10% to 80% B over 10 min].

[0828] Purification was done on a FPLC over a 2.2×25 cm Kromasil C18 column while monitoring the UV at 214 nm and collecting 5 minute fractions. The homogeneous fractions were combined and lyophilized to give a product purity of >95%. The correct molecular mass and purity were confirmed using MALDI-mass spectral analysis.

### Example 4

### General Incretin Pegylation Protocol: (Cys-Maleimido)

[0829] Typically, the glucagon Cys analog is dissolved in phosphate buffered saline (5-10 mg/ml) and 0.01M ethylenediamine tetraacetic acid is added (10-15% of total volume). Excess (2-fold) maleimido methoxyPEG reagent (Nektar) is added and the reaction stirred at room temp while monitoring reaction progress by HPLC. After 8-24 hrs, the reaction mixture, is acidified and loaded onto a preparative reverse phase column for purification using 0.1% TFA/acetonitrile gradient. The appropriate fractions were combined and lyophilized to give the desired pegylated analogs.

### Example 5

### Synthesis of Glucagon-Cex and Other C-Terminal Extended Analogs.

[0830] 285 mg (0.2 mmole) methoxybenzhydrylamine resin (Midwest Biotech) was placed in a 60 ml reaction vessel and the following sequence was entered and run on a modified Applied Biosystems 430A peptide synthesizer using FastBoc HBTU-activated single couplings.

[0831] HSQGTFTSDYSKYLDSRRAQDFVQWLMNTGPSSGAPPPS (SEQ ID NO: 1948) The following side chain protecting groups were used: Arg(Tos), Asp(OcHex), Asn(Xan), Cys(pMeBzl), Glu(OcHex), His(Boc), Lys(2Cl—Z), Ser(Bzl), Thr(Bzl), Trp(CHO), and Tyr(Br—Z). The completed peptidyl resin was treated with 20% piperidine/dimethylformamide to remove the Trp formyl protection then transferred to HF reaction vessel and dried in vacuo. 1.0 ml p-cresol and 0.5 ml dimethyl sulfide were added along with a magnetic stir bar. The vessel was attached to the HF apparatus (Pennisula Labs), cooled in a dry ice/methanol bath, evacuated, and aprox. 10 ml liquid hydrogen fluoride was condensed in. The reaction was stirred in an ice bath for 1 hr then the HF was removed in vacuo. The residue was suspended in ethyl ether; the solids were filtered, washed with ether, and the peptide extracted into 50 ml aqueous acetic acid. An analytical HPLC was run [0.46×5 cm Zorbax C8, 1 ml/min, 45 C, 214 nm, A buffer of 0.1% TFA, B buffer of 0.1% TFA/90% ACN, gradient=10% B to 80% B over 10 min.] on an aliquot of the cleavage extract. The extract was loaded onto a 2.2×25 cm Kromasil C18 preparative reverse phase column and an acetonitrile gradient was run for elution using a Pharmacia FPLC system. 5 min fractions were collected while monitoring the UV at 214 nm (2.0 A). A=0.1% TFA, B=0.1% TFA/50% acetonitrile. Gradient=30% B to 100% B over 450 min. Fractions 58-65 were combined, frozen and lyophilized to give 198.1 mg.

[0832] HPLC analysis of the product showed a purity of greater than 95%. MALDI mass spectral analysis showed the presence of the desired theoretical mass of 4316.7 with the product as a C-terminal amide. Oxyntomodulin and oxyntomodulin-KRNR were similarly prepared as the C-terminal carboxylic acids starting with the appropriately loaded PAM-resin.

### Example 6

### Synthesis of Glucagon Lactams

[0833] 285 mg (0.2 mmole) methoxybenzhydrylamine resin (Midwest Biotech) was added to a 60 mL reaction vessels and the following sequence was assembled on a modified Applied Biosystems 430A peptide synthesizer using Boc DEPBT-activated single couplings.

[0834] HSQGTFTSDYSKYLDERRAQDFVQWLMNT-NH2 (12-16 Lactam; SEQ ID NO: 100).

[0835] The following side chain protecting groups were used: Arg(Tos), Asp(OcHx), Asn(Xan), Glu(OFm), His(BOM), Lys(Fmoc), Ser(Bzl), Thr(Bzl), Trp(CHO), Tyr(Br—Z). Lys(Cl—Z) was used at position 12 if lactams were constructed from 16-20, 20-24, or 24-28. The completed peptidyl resin was treated with 20% piperidine/dimethylformamide for one hour with rotation to remove the Trp formyl group as well as the Fmoc and OFm protection from Lys12 and Glu16. Upon confirmation of removal by a positive ninhydrin test, the resin was washed with dimethylformamide, followed by dichloromethane and then again with dimethylformamide. The resin was treated with 520 mg (1 mmole) Benzotriazole-1-yl-oxy-tris-pyrrolidino-phosphonium hexafluorophosphate (PyBOP) in dimethylformamide and diisopropylethylamine (DIEA). The reaction proceeded for 8-10 hours and the cyclization was confirmed by a negative ninhydrin reaction. The resin was washed with dimethylformamide, followed by dichloromethane and subsequently treated with trifluoroacetic acid for 10 minutes. The removal of the Boc group was confirmed by a positive ninhydrin reaction. The resin was washed with dimethylformamide and dichloromethane and dried before being transferred to a hydrofluoric acid (HF) reaction vessel. 500 μL p-cresol was added along with a magnetic stir bar. The vessel was attached to the HF apparatus (Peninsula Labs), cooled in a dry ice/methanol bath, evacuated, and approximately 10 mL of liquid hydrofluoric acid was condensed into the vessel. The reaction was stirred for 1 hour in an ice bath and the HF was subsequently removed in vacuo. The residue was suspended in ethyl ether; the solids were filtered, washed with ether, and the peptide was solubilized with 150 mL 20% acetonitrile/1% acetic acid.

[0836] An analytical HPLC analysis of the crude solubilized peptide was conducted under the following conditions [4.6×30 mm Xterra C8, 1.50 mL/min, 220 nm, A buffer 0.1% TFA/10% ACN, B buffer 0.1% TFA/100% ACN, gradient 5-95% B over 15 minutes]. The extract was diluted twofold with water and loaded onto a 2.2×25 cm Vydac C4 preparative reverse phase column and eluted using an acetonitrile gradient on a Waters HPLC system (A buffer of 0.1% TFA/10% ACN, B buffer of 0.1% TFA/10% CAN and a gradient of 0-100% B over 120 minutes at a flow of 15.00 ml/min. HPLC analysis of the purified peptide demonstrated greater than 95% purity and electrospray ionization mass spectral analysis confirmed a mass of 3506 Da for the 12-16 lactam. Lactams from 16-20, 20-24, and 24-28 were prepared similarly.

### Example 7

[0837] Preparation of Acylated and/or PEGylated Peptides

[0838] Acylated and/or PEGylated peptides are prepared as follows. Peptides are synthesized on a solid support resin using either a CS Bio 4886 Peptide Synthesizer or Applied Biosystems 430A Peptide Synthesizer. In situ neutralization chemistry is used as described by Schnolzer et al., Int. J. Peptide Protein Res. 40: 180-193 (1992). For acylated peptides, the target amino acid residue to be acylated (e.g., position ten) is substituted with an N ε-FMOC lysine residue. Treatment of the completed N-terminally BOC protected peptide with 20% piperidine in DMF for 30 minutes removes FMOC/formyl groups. Coupling to the free ε-amino Lys residue is achieved by coupling a ten-fold molar excess of either an FMOC-protected spacer amino acid (ex. FMOC—(N—BOC)-Tryptophan-OH) or acyl chain (ex. C17-COOH) and PyBOP or DEPBT coupling reagent in DMF/DIEA. Subsequent removal of the spacer amino acid's FMOC group is followed by repetition of coupling with an acyl chain. Final treatment with 100% TFA results in removal of any side chain protecting groups and the N-terminal BOC group. Peptide resins are neutralized with 5% DIEA/DMF, are dried, and then are cleaved from the support using HF/p-cresol, 95:5, at 0° C. for one hour. Following ether extraction, a 5% HOAc solution is used to solvate the crude peptide. A sample of the solution is then verified to contain the correct molecular weight peptide by ESI-MS. Correct peptides are purified by RP-HPLC using a linear gradient of 10% CH3CN/0.1% TFA to 0.1% TFA in 100% CH3CN. A Vydac C18 22 mm×250 mm protein column is used for the purification. Acylated peptide analogs generally complete elution by a buffer ratio of 20:80. Portions are pooled together and checked for purity on an analytical RP-HPLC. Pure fractions are lyophilized yielding white, solid peptides.

[0839] If a peptide comprises a lactam bridge and target residues to be acylated, acylation is carried out as described above upon addition of that amino acid to the peptide backbone.

[0840] For peptide pegylation, 40 kDa methoxy poly(ethylene glycol) maleimido-propionamide (Chirotech Technology Ltd.) is reacted with a molar equivalent of peptide in 7M Urea, 50 mM Tris-HCl buffer using the minimal amount of solvent needed to dissolve both peptide and PEG into a clear solution (generally less than 2 mL for a reaction using 2-3 mg peptide). Vigorous stirring at room temperature commences for 4-6 hours and the reaction is analyzed by analytical RP-HPLC. PEGylated products appear distinctly from the starting material with decreased retention times. Purification is performed on a Vydac C4 column with conditions similar to those used for the initial peptide purification. Elution typically occurs around buffer ratios of 50:50. Fractions of pure PEGylated peptide are collected and lyophilized.

[0841] Peptides are assayed for biological activity as described above in Example 16. Acylated peptides may exhibit increased potency at the GLP-1 receptor. Inclusion of a tryptophan spacer may provide better potency at the glucagon receptor.

[0842] While acylation can extend the half-life of a peptide to hours or more, PEGylation with repeats in tens of kDa ranges can do even more. Peptides comprising both types of modifications are prepared. These peptides are expected to exhibit extended half-life in circulation, as well as resistance to DPP-IV and other proteases.

### Example 8

### Glucagon Receptor Binding Assay

[0843] The affinity of peptides to the glucagon receptor was measured in a competition binding assay utilizing scintillation proximity assay technology. Serial 3-fold dilutions of the peptides made in scintillation proximity assay buffer (0.05 M Tris-HCl, pH 7.5, 0.15 M NaCl, 0.1% w/v bovine serum albumin) were mixed in 96 well white/clear bottom plate (Corning Inc., Acton, Mass.) with 0.05 nM (3-[¹²⁵I]-iodotyrosyl) Tyr10 glucagon (Amersham Biosciences, Piscataway, N.J.), 1-6 micrograms per well, plasma membrane fragments prepared from cells over-expressing human glucagon receptor, and 1 mg/well polyethyleneimine-treated wheat germ agglutinin type A scintillation proximity assay beads (Amersham Biosciences, Piscataway, N.J.). Upon 5 min shaking at 800 rpm on a rotary shaker, the plate was incubated 12 h at room temperature and then read on MicroBeta1450 liquid scintillation counter (Perkin-Elmer, Wellesley, Mass.). Non-specifically bound (NSB) radioactivity was measured in the wells with 4 times greater concentration of “cold” native ligand than the highest concentration in test samples and total bound radioactivity was detected in the wells with no competitor. Percent specific binding was calculated as following: % Specific Binding=((Bound−NSB)/(Total bound−NSB))×100. IC₅₀ values were determined by using Origin software (OriginLab, Northampton, Mass.).

### Example 9

### Functional Assay-cAMP Synthesis

[0844] The ability of glucagon analogs to induce cAMP was measured in a firefly luciferase-based reporter assay. HEK293 cells co-transfected with a receptor (glucagon receptor, GLP-1 receptor or GIP receptor) and luciferase gene linked to cAMP responsive element were serum deprived by culturing 16 h in DMEM (Invitrogen, Carlsbad, Calif.) supplemented with 0.25% Bovine Growth Serum (HyClone, Logan, Utah) and then incubated with serial dilutions of either glucagon, GLP-1, GIP or novel glucagon analogs for 5 h at 37° C., 5% CO₂ in 96 well poly-D-Lysine-coated “Biocoat” plates (BD Biosciences, San Jose, Calif.). At the end of the incubation 100 microliters of LucLite luminescence substrate reagent (Perkin-Elmer, Wellesley, Mass.) were added to each well. The plate was shaken briefly, incubated 10 min in the dark and light output was measured on MicroBeta-1450 liquid scintillation counter (Perkin-Elmer, Wellesley, Mass.). Effective 50% concentrations were calculated by using Origin software (OriginLab, Northampton, Mass.

### Example 10

### Insulin Receptor Binding Assay:

[0845] The affinity of each peptide for the insulin or IGF-1 receptor was measured in a competition binding assay utilizing scintillation proximity technology. Serial 3-fold dilutions of the peptides were made in Tris-C1 buffer (0.05 M Tris-HCl, pH 7.5, 0.15 M NaCl, 0.1% w/v bovine serum albumin) and mixed in 96 well plates (Corning Inc., Acton, Mass.) with 0.05 nM (3-[125I]-iodotyrosyl) A TyrA14 insulin or (3-[125I]-iodotyrosyl) IGF-1 (Amersham Biosciences, Piscataway, N.J.). An aliquot of 1-6 micrograms of plasma membrane fragments prepared from cells over-expressing the human insulin or IGF-1 receptors were present in each well and 0.25 mg/well polyethylene imine-treated wheat germ agglutinin type A scintillation proximity assay beads (Amersham Biosciences, Piscataway, N.J.) were added. After five minutes of shaking at 800 rpm the plate was incubated for 12 h at room temperature and radioactivity was measured with MicroBeta1450 liquid scintillation counter (Perkin-Elmer, Wellesley, Mass.). Non-specifically bound (NSB) radioactivity was measured in the wells with a four-fold concentration excess of “cold” native ligand than the highest concentration in test samples. Total bound radioactivity was detected in the wells with no competitor. Percent specific binding was calculated as following: % Specific Binding=(Bound−NSB/Total bound−NSB)×100. IC50 values were determined by using Origin software (OriginLab, Northampton, Mass.).

### Example 11

### Insulin Receptor Phosphorylation Assay:

[0846] To measure receptor phosphorylation of insulin or insulin analog, receptor transfected HEK293 cells were plated in 96 well tissue culture plates (Costar #3596, Cambridge, Mass.) and cultured in Dulbecco's modified Eagle medium (DMEM) supplemented with 100 IU/ml penicillin, 100 μg/ml streptomycin, 10 mM HEPES and 0.25% bovine growth serum (HyClone SH30541, Logan, Utah) for 16-20 hrs at 37° C., 5% CO₂ and 90% humidity. Serial dilutions of insulin or insulin analogs were prepared in DMEM supplemented with 0.5% bovine serum albumin (Roche Applied Science #100350, Indianapolis, Ind.) and added to the wells with adhered cells. After 15 min incubation at 37° C. in humidified atmosphere with 5% CO₂ the cells were fixed with 5% paraformaldehyde for 20 min at room temperature, washed twice with phosphate buffered saline pH 7.4 and blocked with 2% bovine serum albumin in PBS for 1 hr. The plate was then washed three times and filled with horseradish peroxidase-conjugated antibody against phosphotyrosine (Upstate biotechnology #16-105, Temecula, Calif.) reconstituted in PBS with 2% bovine serum albumin per manufacturer's recommendation. After 3 hrs incubation at room temperature the plate was washed 4 times and 0.1 ml of TMB single solution substrate (Invitrogen, #00-2023, Carlbad, Calif.) was added to each well. Color development was stopped 5 min later by adding 0.05 ml 1 N HCl. Absorbance at 450 nm was measured on Titertek Multiscan MCC340 (ThermoFisher, Pittsburgh, Pa.). Absorbance vs. peptide concentration dose response curves were plotted and EC₅₀ values were determined by using Origin software (OriginLab, Northampton, Mass.).

### Example 12

### Synthetic Procedures for Incretin-Insulin Fusions (Increlins)

[0847] Scheme 1 as shown in FIG. 4A provides the procedure for the synthesis of the aldehyde linker. The reaction involves a single step Michael addition of triphenylmethylthiol to acrolein (see Org. Biomol. Chem. 2011, 9, 3825). The reaction proceeds in 85-90% yield with the product recovered by solvent evaporation, followed by trituration with hexane. The material is then recrystallized from ethyl acetate/hexane and is stable for storage at room temperature.

[0848] The regioselective modification of the B-chain N-terminus (Chem. Biol. Drug. Des. 2007.69.132) with the linker is conducted under acidic conditions in a sodium acetate buffer at pH 4.0, the concentration of insulin is 1 mg/ml, although it can be carried out at considerably higher concentration (Scheme 2; FIG. 4B). The reductive amination uses a 1.5-2.0 fold excess of the aldehyde and a 30 fold molar excess of sodium cyanoborohydride. The reaction is stirred overnight and is monitored by HPLC. It is stopped by addition of glycine to consume excess aldehyde. The product is recovered by preparative HPLC, with the desired isomer yield of 60%.

[0849] The detritillation shown in Scheme 3 (FIG. 4C) is accomplished by dissolving the product from Scheme 2 in neat TFA containing 2% triisopropylsilane, 2% H₂0 at a 5-10 mg/ml concentration of the insulin derivative. The detritylated material is recovered by ether precipitation and centrifugation in >95% yield.

[0850] The conjugation with 2-thiopyridyl activated incretin (GLP-1, GIP or co-agonist) is accomplished by combining the two solids and co-dissolving in 6M guanidine, pH 6.0 buffer at a total peptide concentration of 20 mg/ml. The reaction is complete in 30-60 minutes and the product is recovered by preparative HPLC (Scheme 4; FIG. 4D).

### Synthetic Procedures

### Synthesis of Trt-S—(CH₂)₂CHO (S-trityl-3-thiopropionaldehyde)¹

[0851] Triphenylmethanethiol (Trt-SH) 2.0 mmoles (553 mg) was dissolved in 4.0 ml of dry methylene chloride, 3.0 mmoles (418 μL) of triethylamine was added along with acrolein, 2.0 mmoles (134 μl) and the reaction was stirred at room temperature for 2 hours. The reaction was monitored by thin-layer chromatography (silica gel, n-hexane/methylene chloride 3:1) which indicated that the reaction was complete at this time. The solvent was removed under reduced pressure and the residue triturated with n-hexane. The crude solid was recrystallized from a mixture of ethyl acetate/hexane to obtain 530 mg, 80% yield.

### Synthesis HS—(CH₂)₃-PheB1-Human Insulin²

[0852] 41.3 μmoles (240 mg) of human insulin (Sigma) was dissolved in a buffer containing 20 mM NaOAc, 200 mM NaCl buffer adjusted to pH 4.0. 100 μmoles (33 mg) of S-trityl-3-thiopropionaldehyde in 1.0 ml of NMP was added to the solution along with 1.2 micromoles (75 mg) of NaCNBH3. The reaction was stirred at room temperature. An additional 40 μmoles of the aldehyde in 0.4 ml NMP was added after 6.0 hours and the reaction was allowed to proceed overnight. LC/MS analysis indicated that only a small amount (<5%) of unmodified insulin remained. The reaction mixture was centrifuged, the pellet dissolved in acetonitrile/H2O and adsorbed onto a Luna C8(2) 250 mm×21.2 mm preparative HPLC column and eluted with a linear 10-55% gradient over 90 mins. Buffer A: 10% ACN/0.1% TFA, Buffer B: ACN/0.1% TFA, flow rate: 15 ml/min, monitoring at 220 nm. Selected fractions were pooled and lyophilized to yield 144 mg, ˜60% Trt-S—(CH₂)₃-PheB1-human insulin. The trityl group was removed by treatment of 100 mg the protected derivative with 20 ml TFA containing 2% triisopropylsilane, 2% water for 20 minutes, followed by precipitation with diethyl ether and lyophilization to afford HS—(CH₂)₃-PheB1-human insulin in 95% yield.

### Synthesis of GLP-1/GIP/GLCG Peptide (Incretin Component)

[0853] Incretin peptides were synthesized using standard Fmoc/tBu-methodology at 0.1 mmol scale on an Applied Biosystems 433A synthesizer starting with Rink ChemMatrix (source) resin utilizing a ten-fold excess of amino acid and DIC/6-C1-HOBt activation. The following side chain protecting group scheme was utilized: Arg(Pbf), Asp(OtBu), Asn(Trt), Cys(Trt), Gln(Trt), Glu(OtBu), His(Trt), Lys(Boc), Ser(tBu), Thr(tBut), Tyr(tBu). The N-terminal His coupling was achieved by treating the peptidyl resin with a tenfold excess of FmocHis(Trt)-OH, DEPBT and twentyfold excess of DIEA in 5.0 ml DMF for 90 minutes. The N-terminal Fmoc group was removed by two 20 minute treatments of 20% piperidine in DMF. Cleavage from the resin and simultaneous conversion to the activated 2-dithiopyridyl activated form was accomplished by suspending the resin in 5 ml TFA containing 100 ul triisopropylsilane, 100 ul water and 20 equivalents of 2-Aldrithiol reagent for 2.0 hrs. Cleaved peptides were precipitated and washed with diethyl ether and dissolved in 20% aqueous acetonitrile containing 1% acetic acid and purified by preparative chromatography. Peptide molecular weights were confirmed by electrospray ionization or MALDI-TOF mass spectrometry and either directly lyophilized or purified by reverse phase chromatography.

Ligation of GLP-1/GIP/GLCG peptide and HS—(CH₂)₃-PheB-Human Insulin.

[0854] 3.0 μmoles (17.7 mg) of HS—(CH₂)₃-PheB I-human insulin and 3.0 μmoles (13.5 mg) of the 2-thiopyridyl incretin were placed is a small vial and dissolved in 1.5 ml of 6.0M guanidine buffer adjusted to pH 6.0. The reaction was stirred for 1 hour, diluted with 2% aqueous AcOH and purified by preparative HPLC to yield 50% of the ligated material following lyophilization. HPLC conditions: Luna C8(2) 250 mm×21.2 mm preparative HPLC column and eluted with a linear 10-55% gradient over 90 mins. Buffer A: 10% ACN/0.1% TFA, Buffer B: ACN/0.1% TFA, flow rate: 15 ml/min, monitoring at 220 nm.

### Example 13

[0855] Incretin-insulin conjugates (increlins) in accordance with the present disclosure were synthesized essentially as described in Examples 1-7 and 12, and tested in vitro for agonist activity at each of the GLP-1 receptor, GIP and insulin receptors essentially as described in Examples 8-11. The N-terminus of the B chain is derivatized to comprise an alkyl thiol group and the incretin has a cysteine amino acid added to allow for a disulfide bond to link the two peptides. The abbreviation C(S—S)—CH2CH2CH2-B1Insulin represents a native two chain human insulin that has been derivatized at the N-terminus of the B chain with an alkyl thiol group. The abbreviation C(S—S)—CH₂CH₂CH₂—B¹Desdi represents a native human insulin that has been derivatized at the N-terminus of the B chain with a an alkylthiol group and residues B28 and B30 have been deleted and B29 directly linked to the N-terminus of the A chain via an amide bond (this single chain analog is inactive at the insulin receptor, but the B29 Lys amide bond is susceptible to cleavage by trypsin or Lys C cleavage to restore the two chain structure and full insulin activity. Thus absent enzymatic activity, an increlin comprising the Desdi insulin analog will only exhibit the associated incretin activity and not activity at the insulin receptor.

[0856] The EC50s at the GLP-1 receptor (GLP-1R), the GIP receptor (GIPR) and the insulin receptor (IR-B) are provided in Table 4. Structures associated with the abbreviated lipidated groups designated in Table 4 are as follows:

[chemical structure]

[chemical structure]

TABLE 4
In vitro activity of Increlins at GLP-1, GIP and Insulin B Receptors

| | Normal- | Normal- | Normal- | | |
|---|---|---|---|---|---|
| | ized | ized | ized | | |
| | GLP-1 | GIP | IR-B | | |
| | EC50 | EC50 | EC50 | | |
| | (nM) | (nM) | (nM) | | |
| CIU# | MEAN | MEAN | MEAN | Incretin Sequence | Insulin Sequence |
| Insulin | | | 0.5000 | | |
| GLP-1 | 0.0250 | | | HAEGTFTSDVSSYLEGQAAKEFIAWLV | |
| | | | | KGRG-OH (SEQ ID NO: 703) | |
| GIP | | 0.0025 | | YAEGTFISDYSIAMDKIHQQDFVNWLL | |
| | | | | AQKGKKNDWKHNITQ-OH | |
| | | | | (SEQ ID NO: 707) | |
| CIU-001 | 0.0122 | >10000 | 0.3220 | HXEGTFTSDVSSYLEEQAAKEFIAWLV | C(S-S)—CH₂CH₂CH₂- |
| | | | | KGGPSSGAPPPS | B¹ Insulin |
| | | | | (SEQ ID NO: 1942) | |
| CIU-002 | 0.0060 | | 0.6800 | HXEGTFTSDVSSYLEEQAAKEFIAWLV | hCys(S-S)—CH₂CH₂CH₂- |
| | | | | KGGPSSGAPPPSKG | B¹ Insulin |
| | | | | (SEQ ID NO: 1943) | |
| CIU-003 | 0.0040 | | 0.4400 | HXEGTFTSDVSSYLEEQAAKEFIAWLV | Pen(S-S)—CH₂CH₂CH₂- |
| | | | | KGGPSSGAPPPSKG | B¹ Insulin |
| | | | | (SEQ ID NO: 1944) | |
| CIU-004 | 7.9600 | | 0.5900 | XEGTFTSDVSSYLEEQAAKEFIAWLVK | C(S-S)—CH₂CH₂CH₂- |
| | | | | GGPSSGAPPPS | B¹ Insulin |
| | | | | (SEQ ID NO: 1945) | |
| CIU-005 | 0.0034 | | 0.4980 | HXEGTFTSDVSSYLEEQAAREFIAWLV | C(S-S)—CH₂CH₂CH₂- |
| | | | | RGGPSSGAPPPS | B¹ Insulin |
| | | | | (SEQ ID NO: 1946) | |
| CIU-006 | 0.0090 | | 0.5500 | HXEGTFTSDVSSYLEEQAAKEFIAWLV | C(S-S)— |
| | | | | KGGPSSGAPPPS | CH(CH₃)CH₂CH₂-B¹ |
| | | | | (SEQ ID NO: 1947) | Insulin |
| CIU-007 | | | 0.2400 | HSQTFTSDYSKYLDSRRAQDFVQWLM | C(S-S)—CH₂CH₂CH₂- |
| | | | | NTGPSSGAPPPS | B¹ Insulin |
| | | | | (SEQ ID NO: 1948) | |
| CIU-008 | | | 0.2400 | HXQTFTSDYSKYLDSRRAQDFVQWLM | C(S-S)—CH₂CH₂CH₂- |
| | | | | NTGPSSGAPPPS | B¹ Insulin |
| | | | | (SEQ ID NO: 1949) | |
| CIU-009 | | | 0.2500 | SQGTFTSDYSKYLDSRRAQDFVQWLM | C(S-S)—CH₂CH₂CH₂- |
| | | | | NTGPSSGAPPPS | B¹ Insulin |
| | | | | (SEQ ID NO: 1950) | |
| CIU-010 | 0.0090 | | 0.4400 | HXEGTFTSDVSSYLEEQAAKEFIAWLV | C(S-S)—CH₂-Ph-CH₂- |
| | | | | KGGPSSGAPPPS | B¹ Insulin |
| | | | | (SEQ ID NO: 1951) | |
| CIU-011 | 0.1340 | 0.0240 | 0.6390 | YXEGTFTSDYSIYLDKQAAXEFVNWLL | C(S-S)—CH₂CH₂CH₂- |
| | | | | AGGPSSGAPPPS | B¹ Insulin |
| | | | | (SEQ ID NO: 1952) | |
| CIU-012 | 0.0029 | 1.5450 | 1.0060 | HXEGTFTSDUSSYLEEQAAKEFIAWLV | C(S-S)—CH₂CH₂CH₂- |
| | | | | KGGPSSGAPPPSG | B¹ Insulin |
| | | | | (SEQ ID NO: 1953) | |
| CIU-013 | 0.0036 | >1000 | 0.7590 | HXEGTFTSDVSSYLEEQAAKEFIAWLV | C(S-S)—CH₂CH₂CH₂- |
| | | | | KGGPSSGAPPPSGU | B¹ Insulin |
| | | | | (SEQ ID NO: 1954) | |
| CIU-014 | 0.0059 | | >1000 | HXEGTFTSDVSSYLEEQAAKEFIAWLV | C(S-S)—CH₂CH₂CH₂- |
| | | | | KGGPSSGAPPPS | B¹ Minipro |
| | | | | (SEQ ID NO: 1955) | |
| CIU-019 | 0.0060 | | 0.3390 | HXEGTFTSDVSSYLEEQAAKEFIAWLV | C(S-S)—CH₂CH₂CH₂- |
| | | | | KG | B¹ Insulin |
| | | | | (SEQ ID NO: 1956) | |
| CIU-020 | 0.7550 | | 1.2800 | XEGTFTSDVSSYLEEQAAKEFIAWLVK | C(S-S)—CH₂CH₂CH₂- |
| | | | | GGPSSGAPPPSU | B¹ Insulin |
| | | | | (SEQ ID NO: 1957) | |
| CIU-021 | 0.0041 | | 1.4330 | HXEGTFTSDUSSYLEEQAAKEFIAWLV | Pen(S- |
| | | | | KGGPSSGAPPPSG | S)—CH₂CH₂CH₂- |
| | | | | (SEQ ID NO: 1958) | B¹ Insulin |
| CIU-022 | 0.1344 | | 1.0768 | HXEGTFTSDVSSYLEEQAAKEFIAWLV | Pen(S- |
| | | | | KGGPSSGAPPPSU | S)—CH₂CH₂CH₂- |
| | | | | (SEQ ID NO: 1959) | B¹ Insulin |
| CIU-023 | 0.0142 | | 5.9750 | HXEGTFTSDVSSYLEEQAAREFIAWLV | C(S- |
| | | | | RGGPSSGAPPPS | S)—CH₂CH₂CH₂- |
| | | | | (SEQ ID NO: 1960) | B¹ Insulin |
| | | | | | (B²⁹ 20K PEG) |
| CIU-024 | 0.0049 | | 0.6170 | HXEGTFTSDVSSYLEEQAAREFIAWLV | C(S- |
| | | | | RGGPSSGAPPPSK | S)—CH₂CH₂CH₂- |
| | | | | (SEQ ID NO: 1961) | B¹ Insulin |
| CIU-025 | 0.0252 | | 30.6741 | HXEGTFTSDVSSYLEEQAAREFIAWLV | C(S- |
| | | | | RGPSSGAPPPSK (20K PEG) | S)—CH₂CH₂CH₂- |
| | | | | (SEQ ID NO: 1962) | B¹ Insulin |
| | | | | | (B²⁹ 20K PEG) |
| CIU-032 | | | | HXEGTFTSDVSSYLEEQAAKEFIAWLV | C(S- |
| | | | | KGGPSSGAPPPSU | S)—CH₂CH₂CH₂- |
| | | | | (SEQ ID NO: 1963) | B¹ Desdi |
| CIU-033 | | | 0.9880 | YXEGTFISDYSIAMDKIHQQDFVNWLL | C(S- |
| | | | | AQKGKKNDWKHNITQ | S)—CH₂CH₂CH₂- |
| | | | | (SEQ ID NO: 1964) | B¹ Insulin |
| CIU-034 | 0.0210 | | 29.7299 | HXEGTFTSDVSSYLEEQAAREFIAWLV | C(S- |
| | | | | RGGPSSGAPPPSK (10K PEG) | S)—CH₂CH₂CH₂- |
| | | | | (SEQ ID NO: 1965) | B¹ Insulin |
| | | | | | (B29 10K PEG) |
| CIU-037 | 0.0129 | | 5.0067 | HXEGTFTSDVSSYLEEQAAREFIAWLV | C(S- |
| | | | | RGGPSSGAPPPSK(20K PEG) | S)—CH₂CH₂CH₂- |
| | | | | (SEQ ID NO: 1966) | B¹ Insulin |
| CIU-038a | | | | GTNLSVPNPLGFFPDHQLDPAFRANSN | C(S- |
| | | | | NPDWDFNPNKDHWPEANKVG | S)—CH₂CH₂CH₂- |
| | | | | (SEQ ID NO: 1967) | B¹ Insulin |
| CIU-038b | | | | C14- | C(S- |
| | | | | GTNLSVPNPLGFFPDHQLDPAFRANSN | S)—CH₂CH₂CH₂- |
| | | | | NPDWDFNPNKDHWPEANKVG | B¹ Insulin |
| | | | | (SEQ ID NO: 1968) | |
| CIU-047 | 0.0130 | | 8.2445 | HXEGTFTSDZSSYLEEQAAREFIAWLV | C(S- |
| | | | | RGGPSSGAPPPSK(20K PEG) | S)—CH₂CH₂CH₂- |
| | | | | (SEQ ID NO: 1969) | B¹ Insulin |
| CIU-048 | 0.0021 | | 1.6800 | HXEGTFTSDUSSYLEEQAAREFIAWLV | C(S- |
| | | | | RGGPSSGAPPPSK(10K PEG) | S)—CH₂CH₂CH₂- |
| | | | | (SEQ ID NO: 1970) | B¹ Insulin |
| CIU-049 | 0.0086 | | 3.7280 | HXEGTFTSDJSSYLEEQAAREFIAWLV | C(S- |
| | | | | RGGPSSGAPPPSK | S)—CH₂CH₂CH₂- |
| | | | | (SEQ ID NO: 1971) | B¹ Insulin |
| CIU-050 | | | | HXEGTFTSDVSSYLEEQAAREFIAWLV | C(S- |
| | | | | RGGPSSGAPPPS | S)—CH₂CH₂CH₂- |
| | | | | (SEQ ID NO: 1972) | B¹ Insulin |
| | | | | | PEG-5 KDa dimer |
| CIU-051 | | | | HXEGTFTSDVSSYLEEQAAREFIAWLV | C(S- |
| | | | | RGGPSSGAPPPS | S—CH₂CH₂CH₂- |
| | | | | (SEQ ID NO: 1972) | B¹ Insulin |
| | | | | | PEG-10 KDa dimer |
| CIU-052 | | | | HXEGTFTSDVSSYLEEQAAREFIAWLV | C(S- |
| | | | | RGGPSSGAPPPS | S)—CH₂CH₂CH₂- |
| | | | | (SEQ ID NO: 1972) | B¹ Insulin |
| | | | | | PEG-20 KDa dimer |
| CIU-054 | 0.0304 | | 3.1950 | HXEGTFTSDUSSYLEEQAAREFIAWLV | C(S- |
| | | | | RGGPSSGAPPPSK(20K PEG) | S)—CH₂CH₂CH₂- |
| | | | | (SEQ ID NO: 1973) | B¹ Insulin |
| CIU-055 | 0.0205 | | 1140.0000 | HXEGTFTSDVSSYLEEQAAREFIAWLV | C(S- |
| | | | | RGGPSSGAPPPSK(20K PEG) | S)—CH₂CH₂CH₂- |
| | | | | (SEQ ID NO: 1974) | B¹ DesDi |
| CIU-056 | 0.0420 | | 38.0900 | HXEGTFTSDVSSYLEEQAAREFIK | C(S- |
| | | | | (20KPEG)WLVRGGPSSGAPPPSK | S)—CH₂CH₂CH₂- |
| | | | | (20K PEG) | B¹ Insulin |
| | | | | (SEQ ID NO: 1975) | |
| CIU-057 | 0.0925 | 36.1187 | 44.2422 | HXEGTFTSDVSSYLEEQAAREFIK | C(S- |
| | | | | (10KPEG)WLVRGGPSSGAPPPSK | S)—CH₂CH₂CH₂- |
| | | | | (10K PEG) | B¹ Insulin |
| | | | | (SEQ ID NO: 1976) | |
| CIU-058 | 1.8470 | 27.4590 | 20.4235 | HSQGTFTSDYSIYLDSRRAQDFVQWLM | C(S- |
| | | | | NTGPSSGAPPPSK(20K PEG) | S)—CH₂CH₂CH₂- |
| | | | | (SEQ ID NO: 1977) | B¹ Insulin |
| CIU-059 | 7.3185 | 0.0185 | 14.7037 | YXEGTFISDYSIYLDRQAAXEFVNWLL | C(S- |
| | | | | AGGPSSGAPPPSK(20K PEG) | S)—CH₂CH₂CH₂- |
| | | | | (SEQ ID NO: 1978) | B¹ Insulin |
| CIU-066 | | | | C14- | C(S- |
| | | | | GTNLSVPNPRGFFPDHQLDPAFRANSN | S)—CH₂CH₂CH₂- |
| | | | | NPDWDFNPNKDHWPEANKVG | B¹ Insulin |
| | | | | (SEQ ID NO: 1979) | |
| CIU-070 | | | | (HXEGTFTSDVSSYLEEQAAREFIAWLV | C(S-S)-B¹ |
| | | | | RGGPSSGAPPPSK)₂PEG | Insulin |
| | | | | 10kd dimer | |
| | | | | (SEQ ID NO: 1980) | |
| CIU-071 | | | | (HXEGTFTSDVSSYLEEQAAREFIAWLV | C(S-S)-B¹ |
| | | | | RGGPSSGAPPPSK)₂PEG | Insulin |
| | | | | 20kd dimer | |
| | | | | (SEQ ID NO: 1981) | |
| CIU-072 | | | | (HXEGTFTSDVSSYLEEQAAREFIAWLV | C(S-S)-B¹ |
| | | | | RGGPSSGAPPPSK)S-S dimer | Insulin |
| | | | | (SEQ ID NO: 1982) | |
| CIU-075 | 0.1555 | 5.8580 | 14.2450 | HXEGTFTSDVSSYLEEQAAREFIAWLV | C(S- |
| | | | | RGK(20K PEG)PSSGAPPPSK | S)—CH₂CH₂CH₂- |
| | | | | (20K PEG) | B¹ Insulin |
| | | | | (SEQ ID NO: 1983) | |
| CIU-076 | 0.0930 | 0.8550 | 84.0300 | HXEGTFTSDVSSYLEEQAAREFIAWLV | C(S- |
| | | | | RGK(10K PEG)PSSGAPPPSK | S)—CH₂CH₂CH₂- |
| | | | | (10K PEG) | B¹ Insulin |
| | | | | (SEQ ID NO: 1984) | |
| CIU-077 | 130.9600 | 0.0270 | 7.0090 | YXEGTFISDYSIAMDRIHQXDFVNWLLA | C(S- |
| | | | | QRGRRNDWRHNITQK(20K PEG) | S)—CH₂CH₂CH₂- |
| | | | | (SEQ ID NO: 1985) | B¹ Insulin |
| CIU-078 | 39.7900 | 0.0110 | 6.4250 | YXEGTFISDYSIAMDRIHQXDFVNWLL | C(S- |
| | | | | AGGPSSGAPPPSK(20K PEG) | S)—CH₂CH₂CH₂- |
| | | | | (SEQ ID NO: 1986) | B¹ Insulin |
| CIU-079 | 0.0149 | 0.0009 | 1.6981 | YXEGTFTSDUSIYLDKQAAXEFVNWLL | C(S- |
| | | | | AGGPSSGAPPPS | S)—CH₂CH₂CH₂- |
| | | | | (SEQ ID NO: 1987) | B¹ Insulin |
| CIU-082 | 0.1254 | 0.0033 | 1.6918 | YXEGTFTSDYSIYLDKQAAXEFVNWLL | C(S- |
| | | | | AGGPSSGAPPPSU | S)—CH₂CH₂CH₂- |
| | | | | (SEQ ID NO: 1988) | B¹ Insulin |
| CIU-083 | 0.5370 | 14.6030 | 3.2280 | HSQGTFTSDYSIYLDXRRAQDFVQWL | C(S- |
| | | | | MNTGPSSGAPPPSK(20K PEG) | S)—CH₂CH₂CH₂- |
| | | | | (SEQ ID NO: 1989) | B¹ Insulin |
| CIU-084 | 0.3530 | 9.1340 | 4.6900 | HSQGTFISDYSIYLDXRRAQDFVQWLM | C(S- |
| | | | | NTGPSSGAPPPSK(20K PEG) | S)—CH₂CH₂CH₂- |
| | | | | (SEQ ID NO: 1990) | B¹ Insulin |
| CIU-085 | 0.0109 | 0.0010 | 735.0000 | YXEGTFTSDUSIYLDKQAAXEFVNWLL | C(S- |
| | | | | AGGPSSGAPPPS | S)—CH₂CH₂CH₂- |
| | | | | (SEQ ID NO: 1991) | B¹ DesDi |
| CIU-089 | 0.0062 | 0.0710 | 1.1990 | HXEGTFTSDUSRYLDERAAQEFVAWL | C(S- |
| | | | | LDAGPSSGAPPPSK | S)—CH₂CH₂CH₂- |
| | | | | (SEQ ID NO: 1992) | B¹ Insulin |
| CIU-090 | 0.0064 | 0.0090 | 1.1230 | HXQGTFTSDUSRYLDERAAQDFVQWL | C(S- |
| | | | | LDAGPSSGAPPPSK | S)—CH₂CH₂CH₂- |
| | | | | (SEQ ID NO: 1993) | B¹ Insulin |
| CIU-091 | 0.0090 | 0.0410 | 1.1070 | HXQGTFTSDUSRYLDERAAQDFVQWL | C(S- |
| | | | | LDGGPSSGAPPPSK | S)—CH₂CH₂CH₂- |
| | | | | (SEQ ID NO: 1994) | B¹ Insulin |
| CIU-092 | 0.0057 | 0.2220 | 2.8845 | HXEGTFTSDUSRYLDERAAQDFVQWL | C(S- |
| | | | | LDGGPSSGAPPPSK | S)—CH₂CH₂CH₂- |
| | | | | (SEQ ID NO: 1995) | B¹ Insulin |
| CIU-093 | 0.4370 | 0.9640 | 1.8410 | XEGTFTSDUSIYLDKQAAXEFVNWLLA | C(S- |
| | | | | GGPSSGAPPPS | S)—CH₂CH₂CH₂- |
| | | | | (SEQ ID NO: 1996) | B¹ Insulin |
| CIU-094 | | 9.8850 | 8.0670 | HSQGTFTSDYSRYLDSRRAQDFVQWL | C(S- |
| | | | | MNTGPSSGAPPPSK(20K PEG) | S)—CH₂CH₂CH₂- |
| | | | | (SEQ ID NO: 1997) | B¹ Insulin |
| CIU-095 | 1.2970 | >10000 | 16.0590 | HXEGTFTSDYSKYLDERAABDFVQWL | C(S- |
| | | | | LEGGPSSGAPPPS | S)—CH₂CH₂CH₂- |
| | | | | (SEQ ID NO: 1998) | B¹ Insulin |
| CIU-096 | 0.7770 | >10000 | 15.3000 | HXEGTFTSDBSKYLDERAAQDFVQWL | C(S- |
| | | | | LEGGPSSGAPPPS | S)—CH₂CH₂CH₂- |
| | | | | (SEQ ID NO: 1999) | B¹ Insulin |
| CIU-097 | 0.4160 | 3.4120 | 21.8550 | HXEGTFTSDYSKYLDERAAQDFVQWL | C(S- |
| | | | | LEGGPSSGAPPPSB | S)—CH₂CH₂CH₂- |
| | | | | (SEQ ID NO: 2000) | B¹ Insulin |
| CIU-098 | 0.0033 | 5.5450 | 135.6000 | HXEGTFTSDYSKYLDERAAQDFVQWL | C(S- |
| | | | | LEGGPSSGAPPPS | S)—CH₂CH₂CH₂- |
| | | | | (SEQ ID NO: 2001) | B¹ Insulin |
| | | | | | (B²⁹B) |
| CIU-106 | 0.0132 | 0.0071 | 154.1400 | YXEGTFTSDYSIYLDKQAAXEFVNWLL | C(S- |
| | | | | AGGPSSGAPPPS | S)—CH2CH2CH2- |
| | | | | (SEQ ID NO: 2002) | B1 Insulin |
| | | | | | (B²⁹B) |
| CIU-107 | 2.9380 | 1.2550 | 6.2400 | YXEGTFTSDBSIYLDKQAAXEFVNWLL | C(S- |
| | | | | AGGPSSGAPPPS | S)—CH₂CH₂CH₂- |
| | | | | (SEQ ID NO: 2003) | B¹ Insulin |
| CIU-108 | 2.8060 | 0.1860 | 5.5300 | YXEGTFTSDYSIYLDKQAAXEFVNWLL | C(S- |
| | | | | AGGPSSGAPPPSB | S)—CH₂CH₂CH₂- |
| | | | | (SEQ ID NO: 2004) | B¹ Insulin |
| CIU-112 | 1.0090 | 0.0800 | 1.7790 | YXEGTFTSDYSIYLDKQAAXEFVNWLL | C(S- |
| | | | | AGGPSSGAPPPSO | S)—CH₂CH₂CH₂- |
| | | | | (SEQ ID NO: 2005) | B¹ Insulin |
| CIU-113 | 2.2715 | 0.8010 | 2.0800 | YXEGTFTSDOSIYLDKQAAXEFVNWLL | C(S- |
| | | | | AGGPSSGAPPPS | S)—CH₂CH₂CH₂- |
| | | | | (SEQ ID NO: 2006) | B¹ Insulin |
| CIU-114 | 0.0180 | 0.0130 | 11.6470 | YXEGTFTSDYSIYLDKQAAXEFVNWLL | C(S- |
| | | | | AGGPSSGAPPPS | S)—CH₂CH₂CH₂- |
| | | | | (SEQ ID NO: 2007) | B¹ Insulin |
| | | | | | (B²⁹-O) |
| CIU-115 | 0.0048 | 0.5530 | | HXEGTFTSDUSSYLEEQAAKEFVNWLL | C(S- |
| | | | | AGGPSSGAPPPS | S)—CH₂CH₂CH₂- |
| | | | | (SEQ ID NO: 2008) | B¹Desdi |
| CIU-116 | 2.0630 | 0.0010 | | YXEGTFISDUSIYLDKQAAXEFVNWLL | C(S- |
| | | | | AGGPSSGAPPPS | S)—CH₂CH₂CH₂- |
| | | | | (SEQ ID NO: 2009) | B¹Desdi |
| CIU-117 | 0.0845 | 0.0346 | 163.4700 | YXEGTFTSDUSIYLDKQAAXEFVNWLL | C(S- |
| | | | | AGGPSSGAPPPS | S)—CH₂CH₂CH₂- |
| | | | | (SEQ ID NO: 2010) | B¹ Insulin |
| | | | | | (B²⁹-O) |
| CIU-118 | 0.0110 | 0.0034 | 1.5800 | YXEGTFTSDUSIYLDKQAAXEFVNWLL | C(S- |
| | | | | AGGPSSGAPPPS | S)—CH₂CH₂CH₂- |
| | | | | (SEQ ID NO: 2011) | B¹ (H₂NCO- |
| | | | | | A¹)Insulin |
| CIU-119 | 0.0170 | 0.0035 | 6.1900 | YXEGTFTSDUSIYLDKQAAXEFVNWLL | C(S- |
| | | | | AGGPSSGAPPPS | S)-CH₂CH₂CO- |
| | | | | (SEQ ID NO: 2012) | B²⁹Insulin |
| CIU-123 | 0.0032 | 0.0036 | | HXEGTFTSDUSIYLDKQAAXEFVNWLL | C(S- |
| | | | | AGGPSSGAPPPS | S)—CH₂CH₂CH₂- |
| | | | | (SEQ ID NO: 2013) | B¹Desdi |
| CIU-146 | 0.0110 | 0.0014 | | YXEGTFTSDU2SIYLDKQAAXEFVNWL | C(S- |
| | | | | LAGGPSSGAPPPS | S)—CH₂CH₂CH₂- |
| | | | | (SEQ ID NO: 2014) | B¹Desdi |
| CIU-147 | 0.0130 | 0.0020 | | YXEGTFTSDU3SIYLDKQAAXEFVNWL | C(S- |
| | | | | LAGGPSSGAPPPS | S)—CH₂CH₂CH₂- |
| | | | | (SEQ ID NO: 2015) | B¹Desdi |
| CIU-173 | | | | YXEGTFTSDUSIYLDKQAAXEFVNWLL | C(S- |
| | | | | AGGPSSGAPPPS | S)—CH₂CH₂CH₂- |
| | | | | (SEQ ID NO: 2016) | B¹ Insulin |
| | | | | | (Lys B²⁹-LCB) |
| CIU-178 | 0.4500 | 0.0580 | | YXEGTFTSDBSIYLDKQAAXEFVNWLL | C(S- |
| | | | | AGGPSSSGAPPPS | S)—CH₂CH₂CH₂- |
| | | | | (SEQ ID NO: 2017) | B¹Desdi |
| CIU-179 | 0.1060 | 0.0200 | | YXEGTFTSDUSIYLDKQAAXEFVNWLL | C(S- |
| | | | | AGGPSSGAPPPSU | S)—CH₂CH₂CH₂- |
| | | | | (SEQ ID NO: 2018) | B¹Desdi |
| CIU-190 | 8.5800 | 0.0021 | 3.0110 | YXEGTFISDYSIYLDKQAAXEFVNWLL | C(S- |
| | | | | AGGPSSGAPPPSU | S)—CH₂CH₂CH₂- |
| | | | | (SEQ ID NO: 2019) | B¹ Insulin |
| CIU-191 | 0.1113 | 0.0026 | >1000 | YXEGTFTSDYSIYLDKQAAXEFVNWLL | C(S- |
| | | | | AGGPSSGAPPPSU | S)—CH₂CH₂CH₂- |
| | | | | (SEQ ID NO: 2020) | B¹Desdi |
| CIU-192 | >10 | 4.9570 | 1.4895 | XEGTFTSDYSIYLDKQAAXEAVNWLL | C(S- |
| | | | | AGGPSSGAPPPSU | S)—CH₂CH₂CH₂- |
| | | | | (SEQ ID NO: 2021) | B¹ Insulin |
| CIU-197 | 0.0149 | 9.4060 | 2.5850 | HXEGTFTSDVSSYLEEQAAKEFIAWLV | C(S- |
| | | | | KGGPSSGAPPPSU | S)—CH₂CH₂CH₂- |
| | | | | (SEQ ID NO: 2022) | B¹ Insulin |
| CIU-216 | 0.0160 | 0.3360 | | HXEGTFTSDVSSYLEKQAAXEFVNWL | C(S- |
| | | | | LAGGPSSGAPPPSU | S)—CH₂CH₂CH₂- |
| | | | | (SEQ ID NO: 2023) | B¹ Insulin |
| CIU-225 | 0.0130 | 1.0100 | 4.4400 | HXEGTFTSDVSIYLDKQAAXEFVNWLL | C(S- |
| | | | | AGGPSSGAPPPSU | S)—CH₂CH₂CH₂- |
| | | | | (SEQ ID NO: 2024) | B¹ Insulin |

Abbreviations: X = Aib, U = K(rEC16), Z = K(rEC14), J = K(succinoylC16), B = K(miniPEG)2-rGlu-C18 diacid, O = K(rGlu-C16 diacid)

### Example 14

### Determination of Rate of Model Dipeptide Cleavage (in PBS)

[0857] A specific hexapeptide (HSRGTF-NH₂; SEQ ID NO: 2036) was used as a model peptide upon which the rate of cleavage of dipeptide N-terminal extensions could be studied. The dipeptide-extended model peptides were prepared Boc-protected sarcosine and lysine were successively added to the model peptide-bound resin to produce peptide A (Lys-Sar-HSRGTF-NH₂; SEQ ID NO: 2036). Peptide A was cleaved by HF and purified by preparative HPLC.

[0858] The rate of cleavage was determined for the respective propeptides. The concentrations of the propeptides and the model parent peptide were determined by their respective peak areas. The first order dissociation rate constants of the prodrugs were determined by plotting the logarithm of the concentration of the prodrug at various time intervals. The slope of this plot provides the rate constant ‘k’. The half-lives for cleavage of the various prodrugs were calculated by using the formula t_{1/2}=0.693/k. The half-life of the Lys-Sar extension to this model peptide HSRGTF-NH₂ (SEQ ID NO: 2036) was determined to be 14.0 h.

### Example 15

[0859] Rate of Dipeptide Cleavage Half Time in Plasma as Determined with an all d-Isoform Model Peptide

[0860] An additional model hexapeptide (dHdTdRGdTdF-NH₂ SEQIDNO: 21) was used to determine the rate of dipeptide cleavage in plasma. The d-isomer of each amino acid was used to prevent enzymatic cleavage of the model peptide, with the exception of the prodrug extension. This model d-isomer hexapeptide was synthesized in an analogous fashion to the 1-isomer. The sarcosine and lysine were successively added to the N-terminus as reported previously for peptide A to prepare peptide B (dLys-dSar-dHdTdRGdTdF-NH₂ SEQ ID NO: 59)

[0861] The rate of cleavage was determined for the respective propeptides. The concentrations of the propeptides and the model parent peptide were determined by their respective peak areas. The first order dissociation rate constants of the prodrugs were determined by plotting the logarithm of the concentration of the prodrug at various time intervals. The slope of this plot provides the rate constant ‘k’. The half-life of the Lys-Sar extension to this model peptide dHdTdRGdTdF-NH₂ (SEQ ID NO: 21) was determined to be 18.6 h.

### Example 16

[0862] The rate of cleavage for additional dipeptides linked to the model hexapeptide (HSRGTF-NH₂; SEQ ID NO: 2036) were determined using the procedures described in Example 5. The results generated in these experiments are presented in Tables 2 and 3.

TABLE 2
Cleavage of the Dipeptides O-U that are linked to the side chain
of an N-terminal para-amino-Phe from the Model Hexapeptide
(HSRGTF-NH₂; SEQ ID NO: 2036) in PBS

[chemical structure]

| Compounds | U (amino acid) | O (amino acid) | t_{1/2} | |
|---|---|---|---|---|
| 1 | F | P | 58 | h |
| 2 | Hydroxyl-F | P | 327 | h |
| 3 | d-F | P | 20 | h |
| 4 | d-F | d-P | 39 | h |
| 5 | G | P | 72 | h |
| 6 | Hydroxyl-G | P | 603 | h |
| 7 | L | P | 62 | h |
| 8 | tert-L | P | 200 | h |
| 9 | S | P | 34 | h |
| 10 | P | P | 97 | h |
| 11 | K | P | 33 | h |
| 12 | dK | P | 11 | h |
| 13 | E | P | 85 | h |
| 14 | Sar | P | ≈1000 | h |
| 15 | Aib | P | 69 | min |
| 16 | Hydroxyl-Aib | P | 33 | h |
| 17 | cyclohexane | P | 6 | min |
| 18 | G | G | No cleavage | |
| 19 | Hydroxyl-G | G | No cleavage | |
| 20 | S | N-Methyl-Gly | 4.3 | h |
| 21 | K | N-Methyl-Gly | 5.2 | h |
| 22 | Aib | N-Methyl-Gly | 7.1 | min |
| 23 | Hydroxyl-Aib | N-Methyl-Gly | 1.0 | h |

TABLE 3
Cleavage of the Dipeptides U-O linked to histidine (or histidine
derivative) at position 1 (X) from the Model Hexapeptide
(XSRGTF-NH₂; SEQ ID NO: 59) in PBS
NH₂-U-O-XSRGTF-NH₂

| Cmp | U (amino acid) | O (amino acid) | X (amino acid) | t_{1/2} | |
|---|---|---|---|---|---|
| 1 | F | P | H | No cleavage | |
| 2 | Hydroxyl-F | P | H | No cleavage | |
| 3 | G | P | H | No cleavage | |
| 4 | Hydroxyl-G | P | H | No cleavage | |
| 5 | A | P | H | No cleavage | |
| 6 | C | P | H | No cleavage | |
| 7 | S | P | H | No cleavage | |
| 8 | P | P | H | No cleavage | |
| 9 | K | P | H | No cleavage | |
| 10 | E | P | H | No cleavage | |
| 11 | Dehydro V | P | H | No cleavage | |
| 12 | P | d-P | H | No cleavage | |
| 13 | d-P | P | H | No cleavage | |
| 14 | Aib | P | H | 32 | h |
| 15 | Aib | d-P | H | 20 | h |
| 16 | Aib | P | d-H | 16 | h |
| 17 | Cyclohexyl- | P | H | 5 | h |
| 18 | Cyclopropyl- | P | H | 10 | h |
| 19 | N—Me-Aib | P | H | >500 | h |
| 20 | α,α-diethyl-Gly | P | H | 46 | h |
| 21 | Hydroxyl-Aib | P | H | 61 | |
| 22 | Aib | P | A | 58 | |
| 23 | Aib | P | N-Methyl-His | 30 | h |
| 24 | Aib | N-Methyl-Gly | H | 49 | min |
| 25 | Aib | N-Hexyl-Gly | H | 10 | min |
| 26 | Aib | Azetidine-2- | H | >500 | h |
| | | carboxylic acid | | | |
| 27 | G | N-Methyl-Gly | H | 104 | h |
| 28 | Hydroxyl-G | N-Methyl-Gly | H | 149 | h |
| 29 | G | N-Hexyl-Gly | H | 70 | h |
| 30 | dK | N-Methyl-Gly | H | 27 | h |
| 31 | dK | N-Methyl-Ala | H | 14 | h |
| 32 | dK | N-Methyl-Phe | H | 57 | h |
| 33 | K | N-Methyl-Gly | H | 14 | h |
| 34 | F | N-Methyl-Gly | H | 29 | h |
| 35 | S | N-Methyl-Gly | H | 17 | h |
| 36 | P | N-Methyl-Gly | H | 181 | h |

[0863] In addition various prodrug derivatives of IGF1YL insulin analogs have been prepared wherein a dipeptide element has been linked via an amide bond through the 4-amino-phenylalanine residue present at A19 of the IGF1YL. The in vitro analysis of these compounds using the procedures of Example 5 reveals that the activity of these compounds increases with time incubated in either a PBS buffer or in 20% plasma. In addition, the in vitro activity of the IGF analog prodrug MIU30: A1(aF19-dLys(Ac),Sar) (dipeptide linked through and amide bond to the A19 4-aminoPhe) was measured for insulin receptor binding relative to native insulin over time (1 hour, 3 hours, 6 hours, 9 hours and 10.5 hours) incubated in 20% plasma. Table 3A compares the relative insulin receptor binding of over time incubated in 20% plasma/PBS at 37° C. As indicated by the data presented in an in vitro binding assay, see Table 3A and an in vitro phosphorylation assay, see Table 3B, increased activity is recovered from the A19 IGF prodrug derivative sample over time, as the prodrug form is converted to the active IGF1YL peptide.

TABLE 3A

| Time (hr) | % Activity of Insulin |
|---|---|
| 0 | 34.44% |
| 9 | 100.09% |
| 95 | 115.42% |

TABLE 3B

| Time (hr) | % Activity of Insulin |
|---|---|
| 1 | 23.0 |
| 3 | 26.8 |
| 6 | 32.5 |
| 9 | 41.1 |
| 10.5 | 43.2 |

[0864] In vivo glucose tolerance tests using C57/Blk mice administered insulin analog MIU-30a:B¹(Y16,L17,Y25)29a:A¹(dLys(Ac),Sar-aF19) (dipeptide linked through and amide bond to the A19 4-aminoPhe), MIU 30 dissolved in PBS (pH 7.4) with 20% plasma and incubated for 48 hours at 37° C. (generating “MIU-30c”). Samples incubated for 0 hr (MIU 30a) and 48 hr (MIU 30c) were withdrawn and injected to C57 black mice at 90 nmol/kg and 270 nmol/kg to measure glucose lowering (insulin tolerance test). In FIG. 8A the glucose lowering profile of MIU 30a and MIU 30c at various times through 8 hr are shown. The parent compound has low potency, but after incubation in 20% plasma for 48 hours (generating “MIU-30c”) potency is increased (See FIG. 8A). In FIG. 8B total blood glucose of MIU 30a and MIU 30c as compared to vehicle is reported as differential area under curve (AUC). At 90 nmol/kg, MIU 30a indicates little change in glucose, while MIU 30c causes a sizable decrease. At 270 nmol/kg, both MIU 30a and MIU 30c demonstrate glucose lowering, but the latter sample possesses significantly more hypoglycemic potency. In summary, the prodrug form of the insulin analog MIU30 shows appreciably lesser glucose lowering potency when injected prior to ex vivo conversion under physiological conditions to the parent insulin analog. These in vivo results are consistent with the in vitro analysis. The half-life of the prodrug is estimated to be approximately 20 hours.

### Example 17

[0865] Dipeptide Cleavage from Prodrug Forms of IGFB 16B17 Derivative Peptides

[0866] The cleavage of an (pNH2-Phe) amide linked dipeptide AibPro from various IGF-1 peptides was measured to determine the impact of the peptide sequence or heteroduplex on the dipeptide cleavage. Results for the tested peptides is shown in Table 11 and the data reveals that the IGF1-A chain alone represents a good model for the study of prodrug half-life for IGF1 B:A (YL)^{B16,17} peptides.

TABLE 11

| Parent Peptide | Half Life (hr) |
|---|---|
| IGF1A(Ala)^{6, 11, 20}(pNH₂-Phe)^{A19} | 2.2 |
| IGF1A(Acm)^{6, 11, 20}(pNH₂-Phe)^{A19} | 1.8 |
| IGF1 B:A(S-S)^{A7, B7}(Acm)^{A6, 11, 20, B19}(pNH₂-Phe)^{A19} | 1.8 |
| IGF1 B:A(pNH₂-Phe)^{A19} | 1.6 |

Comparison of prodrug derivatives of the IGF A-chain relative to the disulfide bound A chain and B chain construct (IGF1 A:B(Y^{B16}L^{B17}) revealed the two compounds had similar half-lives for the prodrug form. Accordingly, the IGF1A chain alone was determined to be a good model for the study of pro-drug half-life on IGF1 B:A (Y^{B16}L^{B17}). Note the AibAla derivative does not cleave and thus is not a prodrug, but serves to show the modification can inactivate the insulin analog IGF1 A:B(Y^{B16}L^{B17})(p-NH₂—F)^{A19}amide. For simplicity, prodrug half-lives were determined using only the IGF1 A chain in the absence of the B chain. The half-lives of each propeptide was determined as described in Example 5. The data is presented in Table 12:

TABLE 12
Dipeptide half life on IGF1 dipeptide
extended (p-NH₂—F)^{A19} amide

| Dipeptide | | Half Life (hr) |
|---|---|---|
| Aib | Pro | 2.2 |
| AibOH | Pro | 165.0 |
| Aib | dPro | 1.9 |
| AibOH | Sar | 2.3 |
| dK(acetyl) | Sar | 16.3 |
| K | Sar | 21.8 |
| K(acetyl) | N-methyl Ala | 23.6 |
| dK(acetyl) | N-methyl Ala | 35.3 |

[0867] The data shows that by altering the substituents on the dipeptide prodrug element that the half-life of prodrug can be varied from 2 hrs to >100 hrs.

[0868] Additional prodrug derivative peptides were prepared using an IGF1-A(pNH2-F)¹⁹ base peptide and altering the amino acid composition of the dipeptide prodrug element linked through the 4-amino phenylalanine at position A19. Dipeptide half-lives were measured for different constructs both in PBS and in 20% plasma/PBS (i.e. in the presence of serum enzymes. The results are provided in Table 13. The results indicate that three of the four peptides tested were not impacted by serum enzymes.

### Example 18

### Biosynthesis and Purification of Single Chain Insulin Analogs

[0869] An insulin-IGF-I minigene comprising a native insulin B and A chain linked via the IGF-I C chain (B⁰-C¹-A⁰) was cloned into expression vector pGAPZtα A (purchased from Invitrogen) under GAP promoter (promoter of the glyceraldehyde-3-phosphate dehydrogenase (GAPDH)) for constitutive expression and purification of recombinant protein in yeast Pichia pastoris. The minigene was fused to an N-terminal peptide encoding Saccharomyces cerevisiae α-mating factor leader signal for secretion of the recombinant protein into the medium. A Kex2 cleavage site between the minigene and the leading α-mating factor sequence was used to cleave the leader sequence for secretion of the minigene with native amino termini. Single-site alanine mutations were introduced into C peptide at positions 1 (G1A), 2 (Y2A), 3 (G3A), 4 (S4A), 5 (S5A), 6 (S6A), 7 (R7A), 8 (R8A), 10 (P10A), 11 (Q11A), and 12 (T12A) of the B⁰-C¹-A⁰ minigene.

[0870] The minigenes including B⁰-C¹-A⁰, eleven alanine mutants, and other select derivatives were transformed into yeast Pichia pastoris by electroporation. Positive transformants were selected on minimal methanol plates and a genomic preparation of each Pichia isolate was performed and integration of the constructs into the yeast genome was confirmed by PCR. An 833 base pair PCR product was visualized on an agarose DNA gel. The insulin analogs were produced by fermentation of a corresponding yeast line. The yeast cells were pelleted by centrifugation at 5 K for 20 minutes in 500 ml Beckman centrifuge tubes and the media was kept for subsequent protein purification.

[0871] Growth media supernatants were filtered through 0.2 μm Millipore filter. Acetonitrile (ACN) was added to the supernatant to a final volume of 20%. The supernatant was purified over a Amberlite XAD7HP resin from Sigma, pre-equilibrated with 20% aqueous ACN. The resin was then rinsed twice with 30 ml of 20% aqueous ACN and contaminants were removed with 30% aqueous ACN containing 0.1% TFA. Partially purified insulin analogs were eluted from the column with 54% aqueous ACN containing 0.1% TFA and lyophilized. Lyophilized samples were re-suspended in 0.025M NH₃HCO₃ pH 8 and purified on a Luna C18 column (10 μm particle size, 300A° pore size). Protein was eluted from the column using a linear gradient of 20-60% aqueous ACN. MALDI-MS positive fractions were pooled and transferred to a disposable scintillation vial for subsequent lyophilization. Lyophilized samples were then resuspended in 20% aqueous ACN containing 0.1% TFA, and purified on a Luna C18 column (10 μm particle size, 300A° pore size). The protein was eluted from the column using a linear gradient of 18-54% aqueous ACN with 0.1% TFA. Protein elution was monitored at an absorbance 280 nm. MALDI-TOF MS positive fractions were analyzed via a C8 analytical column to insure purity.

[0872] The B⁰-C¹-A⁰ analog demonstrated potency that was equally effective at both insulin receptor isoforms and the IGF-1 receptor. Mutation of the tyrosine at position 2 to alanine or the shortening of the C-peptide to eight amino acids through deletion of C9-12 provided a selective enhancement in the specificity of insulin action by significant reduction in the IGF-1 receptor activity. See the data provided in Tables 14A and 14B:

TABLE 14A
Insulin Binding & Phosphorylation Analysis
(B⁰C¹A⁰)

| | Insulin Binding | | Insulin Phosphorylation | |
|---|---|---|---|---|
| Peptide | IC₅₀, nM | n | EC₅₀, nM | n |
| Insulin | 0.54 ± 0.02 | 4 | 1.67 ± 0.13 | 1 |
| IGF-1 | 18.81 ± 1.77 | 3 | 29.20 ± 8.41 | 1 |
| 010 (B⁰C¹A⁰) | 2.83 ± 0.52 | 2 | 1.93 ± 0.43 | 1 |
| G1A | 1.21 ± 0.15 | 1 | 2.4 ± 0.24 | 1 |
| Y2A | 1.95 ± 0.28 | 3 | 1.86 ± 0.42 | 1 |
| G3A | 1.41 ± 0.05 | 2 | 2.13 ± 0.02 | 1 |
| S4A | 0.84 ± 0.47 | 2 | 0.76 ± 0.35 | 1 |
| S5A | 0.93 ± 0.44 | 1 | 2.23 ± 1.27 | 1 |
| S6A | 1.15 ± 0.24 | 1 | 2.33 ± 1.65 | 2 |
| R7A | 6.04 ± 0.82 | 1 | 5.21 ± 4.14 | 1 |
| R8A | 0.63 ± 0.09 | 1 | 2.03 ± 0.06 | 2 |
| P10A | 2.86 ± 0.93 | 1 | 2.59 ± 1.2 | 1 |
| Q11A | 1.79 ± 0.47 | 1 | 2.58 ± 0.83 | 1 |
| T12A | 1.2 ± 0.18 | 1 | 2.83 ± 1.31 | 1 |

TABLE 14B
IGF-1 Binding & Phosphorylation Analysis
(B⁰C¹A⁰)

| | IGF-1 Binding | | IGF-1 Phosphorylation | |
|---|---|---|---|---|
| Peptide | IC₅₀, nM | n | EC₅₀, nM | n |
| Insulin | 60.63 ± 4.43 | 1 | 48.66 ± 1.59 | 1 |
| IGF-1 | 0.38 ± 0.07 | 1 | 0.88 ± 0.41 | 1 |
| 010 (B⁰C¹A⁰) | 4.49 ± 1.04 | 1 | 1.29 ± 2.28 | 1 |
| G1A | 42.36 ± 16.24 | 1 | 1.4 ± 0.62 | 1 |
| Y2A | 257.9 ± 29.59 | 1 | 35.6 ± 14.55 | 1 |
| G3A | 34.02 ± 16.09 | 1 | 7.85 ± 0.78 | 1 |
| S4A | 15.30 ± 3.10 | 1 | 1.64 ± 1.65 | 1 |
| S5A | 13.06 ± 3.01 | 1 | 2.63 ± 1.88 | 1 |
| S6A | 2.44 ± 0.79 | 1 | 1.54 ± 0.62 | 2 |
| R7 | 43.86 ± 8.72 | 1 | 1.26 ± 1.55 | 1 |
| R8 | 10.85 ± 1.47 | 1 | 0.50 ± 0.23 | 2 |
| P10A | 6.42 ± 0.47 | 1 | 2.79 ± 1.12 | 1 |
| Q11A | 4.23 ± 0.43 | 1 | 0.41 ± 0.69 | 1 |
| T12A | 9.15 ± 0.83 | 1 | 1.44 ± 1.36 | 1 |

[0873] The most insulin selective analogs were those that we missing the last four residues of the C-peptide, had an alanine mutation at position two of the C-peptide, or a combination of the two changes.

TABLE 13
Dipeptide half life on IGF1-A(pNH2—F)¹⁹

| | | Half Life (hr) | |
|---|---|---|---|
| | | | 20% |
| | | PBS | Plasma/PBS |
| Aib | Pro | 2.2 | 2.1 |
| Aib | dPro | 2.1 | 2.2 |
| AibOH | Sar | 2.3 | |
| dK | N-isobutyl Gly | 4.4 | 4.1 |
| dK | N-hexyl Gly | 10.6 | |
| dK(acetyl) | Sar | 17.2 | |
| K | Sar | 21.8 | 5.9 |
| K(acetyl) | N-methyl Ala | 23.6 | |
| dK(acetyl) | N-methyl Ala | 35.3 | |
| AibOH | Pro | 165.0 | |
| K(acetyl) | Azetidine-2-carboxylic acid | Not cleavable | |
| dK(acetyl) | Azetidine-2-carboxylic acid | Not cleavable | |

### Example 19

### Insulin Tolerance Tests

[0874] Single Administration

[0875] Six- to eight-week-old male C57BL/6 mice were maintained at 23° C., constant humidity, and a 12-h light-dark cycle. The acute in vivo effects of select peptides were evaluated by subcutaneously injecting peptides solubilized in physiologically buffered saline or a vehicle control to normal or diabetic mice. Blood glucose was measured at various time points through the course of a 24 hr period following administration of the peptides. Each group of mice contained 8 animals per group. The average body weight was ˜25 g. Mice were made diabetic by administration of streptozotocin.

[0876] Serial Administration

[0877] Repeat daily subcutaneous administration of the peptides or vehicle control was administered to the mice for periods of five days to two weeks. The obese mice were given a diabetogenic diet Mice had free access to water and were fed ad libitum with a high fat diet (HFD) comprising 58% of calories from fat (D12331; Research Diets, New Brunswick, N.J.) and each group of mice contained 8 animals per group. The average body weight was ˜50 g and the mice were ˜6 months old males. Body weight and food intake were measured on the days that peptide or vehicle control was administered to the mice. Fasting blood glucose levels were measured repeatedly.

### Example 20

### Procedure for Graded Glucose Infusion in Cynomolgus Monkeys

[0878] Twelve non-naïve male monkeys were selected from a colony, single housed, maintained on a standard 12:12-hour light-dark cycle at 22° C. with free access to a standard chow diet (Harlan) and water, and grouped according to matched body weights (4 kg) into three different treatment groups (n=4). Twenty-four hours before the graded dextrose infusion, the monkeys were administered either saline or the peptides via a single subcutaneous injection. Monkeys from all test groups were fasted for 16 hours before initiation of the graded dextrose infusion. Thirty minutes before the dextrose infusion, the monkeys were sedated with Telazol (intramuscularly, 7 mg/kg), and an intravenous catheter for the dextrose infusion was placed in the cephalic vein. Baseline blood samples were obtained from the femoral artery or vein 20, 10, and 0 min before the infusion of dextrose. At 0 min, an infusion of a dextrose solution at 5 mg/kg per minute was initiated, and blood was collected after 10 and 20 min. Just after the 20-min blood sample was collected, the dextrose infusion rate was increased to 10 mg/kg per minute, and blood samples were again collected after 10 and 20 min of infusion at that rate. Just after the 40-min blood sample was collected, the dextrose infusion rate was increased to 25 mg/kg per minute, and blood was collected after 10 and 20 min of infusion at that rate.

[0879] Blood was collected in EDTA- and aprotinin-containing (250 kallikrein inhibitory units/ml) tubes. Glucose, insulin, and C-peptide were measured in plasma, which was prepared from each of the blood samples described above. Plasma samples were provided to Millipore to measure compound concentration. Insulin was measured by a paramagnetic particle, chemiluminescent immunoassay (Beckman Coulter Access 2), and glucose was measured by the hexokinase method (Roche Hitachi 917). The results of the experiment are provide in FIGS. 35A and 35B.

### Procedure for Pig Studies

[0880] Animals were fasted for 12 hours prior to study. After accessing ports, blood glucose was measured with a handheld glucometer. Using the same glucometer for all animals, two readings were taken to make sure values were consistent. Animals were randomized by glucose level to achieve a balanced distribution across groups. At each specified time-point, ˜3 mL of whole blood was collected into blood collection tubes containing K3EDTA as the anticoagulant and 100 μg/mL Aprotinin and was placed on ice bath immediately following collection. Whole blood samples were centrifuged within 30 minutes of collection and at least 0.5 mL of plasma was obtained and stored for future analysis including insulin PK (ELISA-based assay). A small portion of the 3 mL whole blood sample (prior to placement into the blood collection tubes) was used to check blood glucose using a hand-held glucometer immediately after collection. The results of the experiment are provide in FIGS. 36 and 37.

1. An incretin-insulin conjugate comprising
an incretin peptide; and
an insulin agonist peptide, wherein the incretin peptide is linked to the insulin peptide via a linear chain spacer of 5 to 10 atoms, wherein the incretin peptide is selected from the group consisting of
(i) the amino acid sequence:
X1-X2-Gln-Gly-Thr-Phe-Thr-Ser-Asp-Tyr-Ser-Lys-Tyr-Leu-Asp-Ser-Arg-Arg-Ala-Gln-Asp-Phe-Val-Gln-Trp-Leu-Met-Z₁ (SEQ ID NO: 839) with 1 to 3 amino acid modifications thereto, wherein
X1 and/or X2 is a non-native (relative to SEQ ID NO: 701) amino acid that reduces susceptibility of the incretin peptide to cleavage by dipeptidyl peptidase IV (DPP-IV),
Z₁ is selected from the group consisting of Asn-Thr-COOH, and Y—COOH, wherein Y is 1 to 2 amino acids, and further wherein
(1) a lactam bridge connects the side chains of an amino acid at position i and an amino acid at position i+4, wherein i is 12, 16, 20 or 24 or
(2) one, two, three, or all of the amino acids at positions 16, 20, 21, and 24 of the incretin peptide is substituted with an α, α-disubstituted amino acid;
and said incretin peptide has glucagon agonist activity;
(ii) the amino acid sequence of SEQ ID NO: 701 modified to comprise at least one amino acid modification selected from the group consisting of:
substitution of Asn at position 28 with a charged amino acid;
substitution of Asn at position 28 with a charged amino acid selected from the group consisting of Asp, Glu, cysteic acid, and homocysteic acid;
substitution at position 28 with Asn, Asp, or Glu;
substitution at position 28 with Glu;
substitution of Thr at position 29 with a charged amino acid;
substitution of Thr at position 29 with a charged amino acid selected from the group consisting of Lys, Arg, His, Asp, Glu, cysteic acid, and homocysteic acid;
substitution at position 29 with Asp, Glu, or Lys;
substitution at position 29 with Glu;
insertion of 1-3 charged amino acids after position 29;
insertion after position 29 of Glu or Lys;
insertion after position 29 of Gly-Lys or Lys-Lys: or a combination thereof;
and at least one amino acid modification selected from Group A or Group B, or a combination thereof;
wherein Group A is an amino acid modification selected from the group consisting of substitution of Ser at position 16 with Thr or AIB; and
wherein Group B is an amino acid modification selected from the group consisting of:
substitution of His at position 1 with a non-native amino acid that reduces susceptibility of the incretin peptide to cleavage by dipeptidyl peptidase IV (DPP-IV),
substitution of Ser at position 2 with a non-native amino acid that reduces susceptibility of the incretin peptide to cleavage by dipeptidyl peptidase IV (DPP-IV),
substitution of Tyr at position 10 with Phe or Val;
substitution of Lys at position 12 with Arg;
substitution of Gln at position 20 with Ala or AIB;
substitution of Asp at position 21 with Glu;
substitution of Gln at position 24 with Ala or AIB;
substitution of Met at position 27 with Leu or Nle;
or a combination thereof;
and wherein said incretin peptide has glucagon agonist activity;
(iii) a incretin peptide of SEQ ID NO: 701, modified to comprise
(a) an amino acid modification at position 1 that confers GIP agonist activity,
(b) (1) a lactam bridge between the side chains of amino acids at positions i and i+4 or between the side chains of amino acids at positions j and j+3, wherein i is 12, 13, 16, 17, 20 or 24, and wherein i is 17, or
(2) one, two, three, or all of the amino acids at positions 16, 20, 21, and 24 of the analog is substituted with an α,α-disubstituted amino acid,
(c) amino acid modifications at one, two or all of positions 27, 28 and 29, and
(d) 1-6 further amino acid modifications,
wherein the EC50 of the analog for GIP receptor activation is about 10 nM or less;
(iv) the sequence of SEQ ID NO:1 with
(a) an amino acid at position 10 which is acylated or alkylated with a C4 to C30 fatty acid, and
(b) an AIB at position 16;
(v) an amino acid that differs from SEQ ID NO: 701 by no more than ten amino acid modifications, comprising one or more amino acid substitutions with AIB at positions 16, 20, 21, and/or 24, and an amino acid modification at position 1 and/or 2 that provides reduced susceptibility to cleavage by dipeptidyl peptidase IV, wherein said incretin peptide exhibits at least 20% of the activity of native GLP-1 at the GLP-1 receptor;
(vi) an analog of any of claims (i)-(v), further comprising the amino acid sequence of GPSSGAPPPS (SEQ ID NO: 95) or XGPSSGAPPPS (SEQ ID NO: 96) C-terminal to the amino acid at position 29, wherein X is any amino acid, optionally glycine;
(vii) amino acid of SEQ ID NO: 1 with the following amino acid modifications: Tyr at position 1, an AIB at position 2, Lys at position 10, wherein the Lys is covalently bound to a C16 fatty acyl group via a γ-Glu-γ-Glu dipeptide spacer, Ile at position 12, Lys at position 16, Gln at position 17, Ala at position 18, AIB at position 20, Glu at position 21, Asn at position 24, Leu at position 27, Ala at position 28, Gly at position 29, followed by the amino acid of SEQ ID NO: 95 C-terminal to the amino acid at position 29, and a C-terminal amide in place of the C-terminal alpha carboxylate; and
(viii) X₁X₂EGTFTSDX₁₀SIYLDKQAAX₂₀EFVNWLLAGGPSSGAPPPS (SEQ ID NO: 2037) or X₁X₂EGTFTSDVSIYLDKQAAX₂₀EFVNWLLAGGPSSGAPPPSX₄₀ (SE ID NO: 2038), wherein
X₁ is His or Tyr;
X₂ is aminoisobutyric acid;
X₁₀ is Lys acylated with a C16 to C20 alkyl group optionally via a gamma Glu linker;
X₂₀ is aminoisobutyric acid; and
X₄₀ is Lys acylated with a C16 to C20 alkyl group optionally via a gamma Glu linker;
wherein said insulin peptide comprises an A chain and a B chain wherein said A chain comprises a sequence GIVX₄X₄X₅CCX₈X₉X₁₀CX₁₂LX₁₄X₁₅LX₁₇X₁₈YCX₂₁-R₁₃ (SEQ ID NO: 19), and said B chain comprises a sequence R₂₂-X₂₅LCGX₂₉X₃₀LVX₃₃X₃₄LYLVCGX₄₁X₄₂GFX₄₅ (SEQ ID NO: 20), wherein
X₄ is glutamic acid or aspartic acid;
X₅ is glutamine or glutamic acid
X₈ is histidine, threonine or phenylalanine;
X₉ is serine, arginine, lysine, ornithine or alanine;
X₁₀ is isoleucine or serine;
X₁₂ is serine or aspartic acid;
X₁₄ is tyrosine, arginine, lysine, ornithine or alanine;
X₁₅ is glutamine, glutamic acid, arginine, alanine, lysine, ornithine or leucine;
X₁₇ is glutamic acid, aspartic acid, asparagine, lysine, ornithine or glutamine;
X₁₈ is methionine, asparagine, glutamine, aspartic acid, glutamic acid or threonine;
X₂₁ is selected from the group consisting of alanine, glycine, serine, valine, threonine, isoleucine, leucine, glutamine, glutamic acid, asparagine, aspartic acid, histidine, tryptophan, tyrosine, and methionine;
X₂₅ is histidine or threonine;
X₂₉ is selected from the group consisting of alanine, glycine and serine;
X₃₀ is selected from the group consisting of histidine, aspartic acid, glutamic acid, homocysteic acid and cysteic acid;
X₃₃ is selected from the group consisting of aspartic acid and glutamic acid;
X₃₄ is selected from the group consisting of alanine and threonine;
X₄₁ is selected from the group consisting of glutamic acid, aspartic acid or asparagine;
X₄₂ is selected from the group consisting of alanine, ornithine, lysine and arginine;
X₄₅ is tyrosine or phenylalanine;
R₂₂ is selected from the group consisting of AYRPSE (SEQ ID NO: 14), FVNQ (SEQ ID NO: 12), FVKQ (SEQ ID NO: 8), PGPE (SEQ ID NO: 11), a tripeptide glycine-proline-glutamic acid, a tripeptide valine-asparagine-glutamine, a dipeptide proline-glutamic acid, a dipeptide asparagine-glutamine, glutamine, glutamic acid and an N-terminal amine; and
R₁₃ is COOH or CONH₂;
wherein the spacer comprises:
I. the structure of Formula I: [chemical structure]
wherein R₁, R₂, R₃ and R₄ are independently selected from the group consisting of H, and C₁-C₃ alkyl;
Y is C, S, Se, or S═O,
Z is C, Se, S, S(C₁-C₃)(C₅-C₆ aryl), or Z in combination with Y is —O—N═, or a 1,2,3 triazole;
n is 0 or 1; and
m is 1, 2 or 3, with the proviso that when Y is S═O, Z is C;
II. the structure of Formula II: [chemical structure]
wherein R₁, R₂, R₃ and R₄ are independently selected from the group consisting of H and CH₃, n is 0 or 1, and m is 1, 2 or 3; or
III. the structure of Formula IV: [chemical structure]
wherein R₃ is H or CH₃;
said spacer joining the carboxy terminus of the incretin peptide to the side chain of an amino acid at position B1, B2, B3, B22, B28 or B29 of the B chain, the N-terminal alpha amine of the B chain, or at the side chain of an amino acid at any position of a linking moiety that links the A chain and B chain of a single chain insulin analog.

2. The conjugate of claim 1 wherein the carboxy terminus of the incretin peptide is covalently linked to the amino terminus of the B chain of the insulin peptide via said spacer.

3-5. (canceled)

6. The conjugate of claim 1 wherein the linear chain spacer comprises the general structure of Formula II: [chemical structure]
wherein
R₂, R₃ and are H;
R₁ and R₄ are independently H or CH₃;
n is 0 or 1; and
m is 1 or 2.

7. The conjugate of claim 1 wherein the linear chain spacer comprises the general structure of Formula IV: [chemical structure]
wherein R₃ is H or CH₃.

8. The conjugate of claim 7 wherein R₃ is H.

9-13. (canceled)

14. The conjugate of claim 1 wherein said A chain comprises the sequence GIVEQCCX₈X₉ICSLYQLENYCX₂₁-R₁₃ (SEQ ID NO: 73) said B chain comprises the sequence R₂₂-X₂₅LCGX₂₉X₃₀LVX₃₃X₃₄LYLVCGX₄₁X₄₂GFX₄₅ (SEQ ID NO: 20)
X₈ is histidine or threonine;
X₉ is serine, lysine, or alanine;
X₂₁ is alanine, glycine or asparagine;
X₂₅ is histidine or threonine;
X₂₉ is selected from the group consisting of alanine, glycine and serine;
X₃₀ is selected from the group consisting of histidine, aspartic acid, glutamic acid, homocysteic acid and cysteic acid;
X₃₃ is selected from the group consisting of aspartic acid and glutamic acid;
X₃₄ is selected from the group consisting of alanine and threonine;
X₄₁ is selected from the group consisting of glutamic acid, aspartic acid or asparagine;
X₄₂ is selected from the group consisting of alanine, ornithine, lysine and arginine;
X₄₅ is tyrosine or phenylalanine;
R₂₂ is selected from the group consisting of FVNQ (SEQ ID NO: 12), FVKQ (SEQ ID NO: 8), a tripeptide valine-asparagine-glutamine, a dipeptide asparagine-glutamine, glutamine and an N-terminal amine; and
R₁₃ is COOH or CONH₂.

15-17. (canceled)

18. The conjugate of claim 1 wherein the insulin peptide comprises
an A chain sequence of GIVEQCCTSICSLYQLENYCN-R₁₃ (SEQ ID NO: 1); and
a B chain sequence selected from the group consisting of
FVNQHLCGSHLVEALYLVCGERGFFYTPKT (SEQ ID NO: 2)
FVNQHLCGSHLVEALYLVCGERGFFYTKPT (SEQ ID NO: 9)
FVNQHLCGSHLVEALYLVCGERGFFYTDKT (SEQ ID NO: 5) and
FVKQHLCGSHLVEALYLVCGERGFFYTEKT (SEQ ID NO: 6); and
said linear chain spacer joining the incretin to the insulin peptide comprises the general structure of [chemical structure]
wherein the cysteine amino acid of the linear chain spacer is linked to the carboxy terminus of the incretin via an amide bond and Q1 is N-terminus of the insulin B chain.

19. The conjugate of claim 1 wherein
the C-terminal amino acid of the incretin peptides is covalently linked to the insulin peptide via said linear chain spacer at the N-terminal alpha amine of the B chain;
said insulin peptide comprising
an A chain sequence of GIVEQCCX₈SICSLYQLENYCX₂₁ (SEQ ID NO: 3); and
a B chain sequence of R₂₂-HLCGSHLVEALYLVCGERGFX₄₅ (SEQ ID NO: 15), wherein the B chain is linked to the A chain through disulfide linkages; and
R₂₂ is a bond, or a 1 to 4 amino acid sequence selected from the group consisting of a FVNQ (SEQ ID NO: 12), FVKQ (SEQ ID NO: 8), VNQ, NQ and Q;
X₈ is selected from the group consisting of threonine and histidine;
X₂₁ is selected from the group consisting of asparagine, lysine, glycine, alanine; and
X₄₅ is histidine, tyrosine or phenylalanine; and
said incretin peptide comprises
the sequence X₈₀X₈₁X₈₂GTFTSDYSX₈₃YLX₈₄X₈₅X₈₆X₈₇X₈₈X₈₉FX₉₀X₉₁WLX₉₂X₉₃X₉₄-Z₁ (SEQ ID NO: 1928), wherein
X₈₀ is His, Tyr, D-histidine, desaminohistidine, hydroxyl-histidine, acetyl-histidine, homo-histidine or alpha, alpha-dimethyl imidiazole acetic acid (DMIA) N-methyl histidine, alpha-methyl histidine, or imidazole acetic acid;
X₈₁ is Ser, D-serine, Ala, Val, glycine, N-methyl serine or aminoisobutyric acid (AIB), N-methyl alanine and D-alanine;
X₈₂ is Gln or Glu;
X₈₃ is Lys or Ile;
X₈₄ is Asp or Glu;
X₈₅ is Lys, Arg, Ser or Glu;
X₈₆ is Arg or Gln;
X₈₇ is Ala or Arg;
X₈₈ is aminoisobutyric acid, Gln or Lys;
X₈₉ is Asp or Glu;
X₉₀ is Val or Ile;
X₉₁ is Asn, Gln or Ala;
X₉₂ is Leu, Val or Met;
X₉₃ is Ala, Asp, Lys Asn or Ala;
X₉₄ is Gly or Thr; and Z₁ is selected from the group consisting of —COOH, GPSSGAPPPS (SEQ ID NO: 820), KRNRNNIA (SEQ ID NO: 821) and KRNR (SEQ ID NO: 822).

20. The conjugate of claim 19 wherein
X₈₀ is His or Tyr;
X₈₆ is aminoisobutyric acid; and
Z₁ is GPSSGAPPPS (SEQ ID NO: 820).

21. The conjugate of claim 19 wherein
said incretin peptide is a peptide selected from the group consisting of Y(aib)EGTFTSDYSIYLDKQAA(aib)EFVNWLLAGGPSSGAPPPS (SEQ ID NO: 756), H(aib)QGTFTSDYSKYLDERAAQDFVQWLLDGGPSSGAPPPS (SEQ ID NO: 1931), H(aib)EGTFTSDVSSYLEEQAAKEFIAWLVKGGPSSGAPPPS (SEQ ID NO: 1932), HSQGTFTSDYSKYLDSRRAQDFVQWLMNTGPSSGAPPPS (SEQ ID NO: 1933), and YaibEGTFISDYSIYLDRQAAaibEFVNWLLAGGPSSGAPPPS (SEQ ID NO: 1934);
said linear chain spacer joining the incretin to the insulin peptide comprises the general structure of Formula II: [chemical structure]
wherein R₁, R₂, R₃ and R₄ are independently selected from the group consisting of H, and CH₃, n is 0 or 1, and m is 1, 2 or 3; and
said insulin peptide comprises an A chain sequence of GIVEQCCTSICSLYQLENYCN-R₁₃ (SEQ ID NO: 1) and a B chain sequence selected from the group consisting of FVNQHLCGSHLVEALYLVCGERGFFYTPKT (SEQ ID NO: 2) FVNQHLCGSHLVEALYLVCGERGFFYTKPT (SEQ ID NO: 9) FVNQHLCGSHLVEALYLVCGERGFFYTDKT (SEQ ID NO: 5) FVKQHLCGSHLVEALYLVCGERGFFYTEKT (SEQ ID NO: 6).

22. The conjugate of claim 21 wherein
said linear chain spacer joining the incretin to the insulin peptide comprises the general structure of Formula II: [chemical structure]
wherein R₁, R₂, R₃ and R₄ are independently selected from the group consisting of H, and CH₃, n is 0, and m is 2.

23. The conjugate of claim 1 wherein
said incretin peptide comprises the sequence Y(aib)EGTFTSDYSIYLDKQAA(aib)EFVNWLLAGGPSSGAPPPS (SEQ ID NO: 756), or H(aib)QGTFTSDYSKYLDERAAQDFVQWLLDGGPSSGAPPPS (SEQ ID NO: 1931); and
said insulin peptide comprises an A chain sequence of GIVEQCCTSICSLYQLENYCN-R₁₃ (SEQ ID NO: 1) and a B chain sequence selected from the group consisting of FVNQHLCGSHLVEALYLVCGERGFFYTPKT (SEQ ID NO: 2), FVNQHLCGSHLVEALYLVCGERGFFYTKPT (SEQ ID NO: 9), FVNQHLCGSHLVEALYLVCGERGFFYTDKT (SEQ ID NO: 5), and FVKQHLCGSHLVEALYLVCGERGFFYTEKT (SEQ ID NO: 6).

24. (canceled)

25. The conjugate of claim 21 wherein
i) the side chain of an amino acid position 10 or 40 of the insulin peptide further comprises a non-native alkyl or acyl group; or
ii) the side chain of an amino acid at position 24 or 40 of the incretin peptide, or position B28 or B29 of the insulin peptide is linked to a hydrophilic moiety, optionally said hydrophilic moiety is polyethylene glycol; or
iii) a combination of i) and ii).

26-27. (canceled)

28. A prodrug derivative of the conjugate of claim 1 wherein a prodrug peptide element having the general structure of structure: [chemical structure]
is linked to N-terminal amine of the insulin A chain, wherein
R₁ is (C₁-C₆ alkyl)NH—R₉ or (C₁-C₆ alkyl)NH—S₁—R₉;
R₂ is H or C₁-C₆ alkyl:
R₃ is selected from the group consisting of C₁-C₄ alkyl, C₃-C₈ alkenyl, (C₀-C₄ alkyl)(C₄-C₆ cycloalkyl), (C₀-C₄ alkyl)(C₃-C₅ heterocyclic), (C₀-C₄ alkyl)(C₆-C₁₀ aryl) or R₄ and R₃ together with the atoms to which they are attached form a 4, 5 or 6 member heterocyclic ring;
R₄, and R₈ are independently selected from the group consisting of H, C₁-C₁₈ alkyl, C₂-C₁₈ alkenyl, (C₁-C₁₈ alkyl)OH, (C₁-C₁₈ alkyl)SH, (C₂-C₃ alkyl)SCH₃, (C₁-C₄ alkyl)CONH₂, (C₁-C₄ alkyl)COOH, (C₁-C₄ alkyl)NH₂, (C₁-C₄ alkyl)NHC(NH₂⁺)NH₂, (C₀-C₄ alkyl)(C₃-C₆ cycloalkyl), (C₀-C₄ alkyl)(C₂-C₅ heterocyclic), (C₀-C₄ alkyl)(C₆-C₁₀ aryl)R₇, (C₁-C₄ alkyl)(C₃-C₉ heteroaryl), and C₁-C₁₂ alkyl(W₁)C₁-C₁₂ alkyl, wherein W₁ is a heteroatom selected from the group consisting of N, S and O, or R₄ and R₈ together with the atoms to which they are attached form a C₃-C₆ cycloalkyl;
R₁₀, R11, R₁₂, and R₁₃ are independently selected from the group consisting of H, CH₃, (C₁-C₄ alkyl)COOH, (C₁-C₄ alkyl)NH₂, (C₁-C₄ alkyl)NHC(NH₂⁺)NH₂ and CH₂(C₃—N₂ heterocyclic);
R₅ is NHR₆ or OH;
R₆ is H, or C₁-C₈ alkyl;
R₇ is selected from the group consisting of H, OH, C₁-C₁₈ alkyl, C₂-C₁₈ alkenyl, (C₀-C₄ alkyl)NH₂, and (C₀-C₄ alkyl)OH;
R₉ is selected from the group consisting of C₂₀-C₃₀ acyl; and
S₁ is a bond or a spacer consisting of one to six amino acids, wherein said spacer comprises one or more charged amino acids selected from the group consisting of aspartic acid, glutamic acid, cysteic acid, arginine and lysine.

29. The conjugate of claim 1 wherein the insulin peptide is a single chain insulin and the peptide linker joining the B and A chains is selected from the group consisting of SSSSKAPPPSLPSPSRLPGPSDTPILPQR (SEQ ID NO: 1922), SSSSRAPPPSLPSPSRLPGPSDTPILPQK (SEQ ID NO: 1923), GAGSSSX₅₇X₅₈ (SEQ ID NO: 76), GYGSSSRR (SEQ ID NO: 61), GAGSSSRR (SEQ ID NO: 1925) and GYGSSSX₅₇X₅₈APQT; (SEQ ID NO: 77), wherein
X₅₇ and X₅₈ are independently arginine, lysine or ornithine.

30. (canceled)

31. The conjugate of claim 1 wherein the incretin peptide comprises the sequence X₁X₂EGTFTSDX₆SSYLEEQAAKEFIAWLVK-R₄ (SEQ ID NO: 1936), or X₁X₂QGTFTSDYSKYLDERX₅AKDFVX₃WLMN-R₄ (SEQ ID NO: 1937)
wherein
X₁=His, D-histidine, desaminohistidine, hydroxyl-histidine, acetyl-histidine, homo-histidine or alpha, alpha-dimethyl imidiazole acetic acid (DMIA) N-methyl histidine, alpha-methyl histidine, or imidazole acetic acid,
X₂=Ser, D-serine, Ala, Val, glycine, N-methyl serine or aminoisobutyric acid (AIB), N-methyl alanine or D-alanine;
X₃=Ala, Gln or Cys-PEG;
R4=Thr-CONH2 or Cys-PEG or GGPSSGAPPPS (SEQ ID NO: 515), GGPSSGAPPPSC-PEG (SEQ ID NO: 516) or GGPSSGAPPPSCK(rEC16)C (SEQ ID NO: 1935)
X₅=Ala or Arg and
X₆=valine, tyrosine or K(rEC16)C
wherein, when X₃ is Cys-PEG, X₄ is not Cys-PEG or GGPSSGAPPPSC-PEG (SEQ ID NO: 516), and when X₂=Ser, X₁ is not His.

32. (canceled)

33. The conjugate of claim 1 wherein the incretin peptide comprises an analog of glucagon (SEQ ID NO: 701) having GIP agonist activity, said analog comprising one or more of the following modifications:
(a) an amino acid modification at position 1 that confers GIP agonist activity, optionally, wherein the amino acid at position 1 is an amino acid lacking an imidazole side chain;
(b) an amino acid substitution of Ser at position 16 with an amino acid of Formula IV: [chemical structure]
wherein n is 1 to 7, wherein each of R1 and R2 is independently selected from the group consisting of H, C₁-C₁₈ alkyl, (C₁-C₁₈ alkyl)OH, (C₁-C₁₈ alkyl)NH₂, (C₁-C₁₈ alkyl)SH, (C₀-C₄ alkyl)(C₃-C₆)cycloalkyl, (C₀-C₄ alkyl)(C₂-C₅ heterocyclic), (C₀-C₄ alkyl)(C₆-C₁₀ aryl)R₇, and (C₁-C₄ alkyl)(C₃-C₉ heteroaryl), wherein R₇ is H or OH, and the side chain of the amino acid of Formula IV comprises a free amino group, the amino acid of Formula IV optionally being homoLys, Lys, Orn, or 2,4-diaminobutyric acid (Dab),
(c) one, two, three, or all of the amino acids at positions 16, 20, 21, and 24 of the analog is substituted with an α,α-disubstituted amino acid,
(d) amino acid modifications at one, two or all of positions 27, 28 and 29, and
(e) 1-9 further amino acid modifications relative to the glucagon sequence (SEQ ID NO: 701),
wherein the EC50 of the analog for GIP receptor activation is about 10 nM or less.

34. The conjugate of claim 33, wherein the incretin peptide comprises the following modifications: (a) the amino acid at position 1 is a large, aromatic amino acid, optionally, Tyr, and (b) wherein (i) the Met at position 27 is substituted with a large, aliphatic amino acid, optionally Leu, (ii) the Asn at position 28 is substituted with a small aliphatic amino acid, optionally Ala, or (iii) the Thr at position 29 is substituted with a small aliphatic amino acid, optionally Gly, or wherein the analog comprises a combination of (i), (ii), and (iii).

35. (canceled)

36. The conjugate of claim 34, wherein the incretin peptide further comprises one or more of the following modifications:
(a) Ser at position 2 substituted with D-Ser, Ala, D-Ala, Gly, N-methyl-Ser, AIB, Val, or α-amino-N-butyric acid;
(b) Gln at position 3 substituted with Glu;
(c) substitution of the amino acid Tyr at position 10 with an amino acid, optionally an amino acid of Formula I: [chemical structure]
wherein n=1 to 4,
comprising a side chain covalently linked to an acyl group or alkyl group;
(d) addition of an amino acid, optionally an amino acid of Formula I, comprising a side chain covalently linked to an acyl group or alkyl group at the C-terminal amino acid of the analog;
(e) Lys at position 12 substituted with Ile;
(f) Arg at position 17 substituted with Gln;
(g) Arg at position 18 substituted with Ala;
(h) Asp at position 21 substituted with Glu;
(i) Gln at position 24 substituted with Asn; and
(j) replacement of the carboxylic acid of the C-terminal amino acid with a charge-neutral group, optionally, an amide.

37. The conjugate of claim 1 wherein the incretin peptide comprises the sequence of HAEGTFTSDVSSYLEEQAAREFIAWLVRGRG (SEQ ID NO: 700), HAEGTFTSDVSSYLEGQAAKEFIAWLVKGRG (SEQ ID NO: 703), HAEGTFTSDVSSYLEGQAAKEFICWLVKGR (SEQ ID NO: 717) HSQGTFTSDYSKYLDSRRAQDFVQWLMNT (SEQ ID NO: 701) or HSQGTFTSDYSKYLDERRAQDFVQWLMNT (SEQ ID NO: 699), optionally with any of SEQ ID NO: 703), (SEQ ID NO: 717), (SEQ ID NO: 701) or (SEQ ID NO: 699) further comprising a terminal extension of an amino acid sequence of GPSSGAPPPS (SEQ ID NO: 820) or GGPSSGAPPPS (SEQ ID NO: 1096).

38-41. (canceled)

42. A pharmaceutical composition comprising a conjugate of claim 1, or pharmaceutically acceptable salt thereof, and a pharmaceutically acceptable carrier.

43-44. (canceled)

The application's sequence listing, which the Patent Office published only in electronic form, follows.

SEQUENCE LISTING (2038 sequences)

SEQ ID NO: 1 - protein, 21 aa, Homo sapiens
GIVEQCCTSICSLYQLENYCN

SEQ ID NO: 2 - protein, 30 aa, Homo sapiens
FVNQHLCGSHLVEALYLVCGERGFFYTPKT

SEQ ID NO: 3 - protein, 21 aa, Artificial Sequence
  Analog of the insulin A chain
  MISC_FEATURE (8)..(8): Xaa at position 8 is threonine or histidine
  MISC_FEATURE (21)..(21): Xaa at position 21 is asparagine, glycine, alanine, glutamine, glutamate, threonine, or serine
GIVEQCCXSICSLYQLENYCX

SEQ ID NO: 4 - protein, 21 aa, Artificial Sequence
  Analog of the insulin B chain
  MISC_FEATURE (1)..(1): Xaa at position 1 is histidine or threonine
  MISC_FEATURE (5)..(5): Xaa at position 5 is alanine, glycine or serine
  MISC_FEATURE (6)..(6): Xaa at position 6 is histidine, aspartic acid, glutamic acid, homocysteic acid or cysteic acid
XLCGXXLVEALYLVCGERGFF

SEQ ID NO: 5 - protein, 30 aa, Homo sapiens
FVNQHLCGSHLVEALYLVCGERGFFYTDKT

SEQ ID NO: 6 - protein, 30 aa, Homo sapiens
FVKQHLCGSHLVEALYLVCGERGFFYTEKT

SEQ ID NO: 7 - protein, 21 aa, Homo sapiens
HLCGSHLVEALYLVCGERGFF

SEQ ID NO: 8 - protein, 4 aa, Homo sapiens
FVKQ

SEQ ID NO: 9 - protein, 30 aa, Homo sapiens
FVNQHLCGSHLVEALYLVCGERGFFYTKPT

SEQ ID NO: 10 - protein, 30 aa, Artificial Sequence
  Analog of insulin B chain
  MISC_FEATURE (1)..(1): Xaa at position 1 is phenylalanine or desamino-phenylalanine.
  MISC_FEATURE (5)..(5): Xaa at position 5 is histidine and threonine
  MISC_FEATURE (9)..(9): Xaa at position 9 is alanine, glycine or serine
  MISC_FEATURE (10)..(10): Xaa at position 10 is histidine, aspartic acid, glutamic acid, homocysteic acid or cysteic acid
XVNQXLCGXXLVEALYLVCGERGFFYTPKT

SEQ ID NO: 11 - protein, 4 aa, Homo sapiens
PGPE

SEQ ID NO: 12 - protein, 4 aa, Homo sapiens
FVNQ

SEQ ID NO: 13 - protein, 30 aa, Artificial Sequence
  Analog of insulin B chain
  MISC_FEATURE (1)..(1): Xaa at position 1 is phenylalanine or desamino-phenylalanine.
  MISC_FEATURE (5)..(5): Xaa at position 5 is histidine and threonine
  MISC_FEATURE (9)..(9): Xaa at position 9 is alanine, glycine or serine
  MISC_FEATURE (10)..(10): Xaa at position 10 is histidine, aspartic acid, glutamic acid, homocysteic acid or cysteic acid
XVNQXLCGXXLVEALYLVCGERGFFYTKPT

SEQ ID NO: 14 - protein, 6 aa, Homo sapiens
AYRPSE

SEQ ID NO: 15 - protein, 21 aa, Homo sapiens
  MISC_FEATURE (21)..(21): Xaa at position 21 is histidine, tyrosine or phenylalanine
HLCGSHLVEALYLVCGERGFX

SEQ ID NO: 16 - protein, 21 aa, Homo sapiens
  MISC_FEATURE (1)..(1): Xaa at position 1 is histidine or threonine
  MISC_FEATURE (5)..(5): Xaa at position 5 is alanine, glycine or serine
  MISC_FEATURE (6)..(6): Xaa at position 6 is histidine, aspartic acid, glutamic acid, homocysteic acid orcysteic acid
  MISC_FEATURE (21)..(21): Xaa at position 21 is histidine, tyrosine or phenylalanine
XLCGXXLVEALYLVCGERGFX

SEQ ID NO: 17 - protein, 6 aa, Artificial Sequence
  peptide linker
  MISC_FEATURE (1)..(1): The Xaa at position 1 is histidine or a histidine analog
  MOD_RES (6)..(6): Amidation
XSRGTF

SEQ ID NO: 18 - protein, 8 aa, Artificial Sequence
  model synthetic peptide
  MISC_FEATURE (2)..(2): The Xaa at position 2 is sarcosine
  MOD_RES (8)..(8): AMIDATION
KXHSRGTF

SEQ ID NO: 19 - protein, 21 aa, Artificial Sequence
  Analog of the insulin A chain
  MISC_FEATURE (4)..(4): Xaa at position 5 is aspartic acid or glutamic acid
  MISC_FEATURE (5)..(5): Xaa at position 5 is glutamine or glutamic acid
  MISC_FEATURE (8)..(8): Xaa at position 8 is histidine, threonine or phenylalanine
  MISC_FEATURE (9)..(9): Xaa at position 9 is serine, arginine, ornithine, lysine or alanine
  MISC_FEATURE (10)..(10): Xaa at position 10 is isoleucine or serine
  MISC_FEATURE (12)..(12): Xaa at position 12 is aspartic acid or serine
  MISC_FEATURE (14)..(14): Xaa at position 14 is tyrosine, arginine, ornathine, lysine or alanine
  MISC_FEATURE (15)..(15): Xaa at position 15 is glutamine, glutamic acid, arginine, ornithine, alanine, lysine or leucine
  MISC_FEATURE (17)..(17): Xaa at position 17 is glutamine or glutamic acid
  MISC_FEATURE (18)..(18): Xaa at position 18 is methionine, asparagine, glutamine, glutamic acid, aspartic acid or threonine
  MISC_FEATURE (21)..(21): Xaa at position 21 is alanine, glycine, serine, valine, threonine, isoleucine, leucine, glutamine, glutamic acid, asparagine, aspartic acid, histidine, tryptophan, tyrosine, or methionine
GIVXXCCXXXCXLXXLXXYCX

SEQ ID NO: 20 - protein, 21 aa, Artificial Sequence
  Analog of the insulin B chain
  MISC_FEATURE (1)..(1): Xaa at position 1 is histidine or threonine
  MISC_FEATURE (5)..(5): Xaa at position 5 is alanine, glycine or serine
  MISC_FEATURE (6)..(6): Xaa at position 6 is histidine, aspartic acid, glutamic acid, homocysteic acid or cysteic acid
  MISC_FEATURE (9)..(9): Xaa at position 9 is aspartic acid, glutamine or glutamic acid
  MISC_FEATURE (10)..(10): Xaa at position 10 is alanine or threonine
  MISC_FEATURE (17)..(17): Xaa at position 12 is glutamic acid, aspartic acid or asparagine
  MISC_FEATURE (18)..(18): Xaa at position 18 is alanine, ornithine, lysine or arginine
  MISC_FEATURE (21)..(21): Xaa at position 21 is tyrosine or 4-amino-phenylalanine
XLCGXXLVXXLYLVCGXXGFX

SEQ ID NO: 21 - protein, 6 aa, Artificial Sequence
  glucagon analogue
  MOD_RES (1)..(1): Xaa at position 1 is d-histidine
  MOD_RES (2)..(2): Xaa at position 2 is d-threonine
  MOD_RES (3)..(3): Xaa at position 3 is d-arginine
  MOD_RES (5)..(5): Xaa at position 5 is d-threonine
  MOD_RES (6)..(6): Xaa at position 6 is d-phenylalanine
XXXGXX

SEQ ID NO: 22 - protein, 7 aa, Artificial Sequence
  peptide linker
GGGPGKR

SEQ ID NO: 23 - protein, 12 aa, Artificial Sequence
  peptide linker
GYGSSSRRAPQT

SEQ ID NO: 24 - protein, 7 aa, Artificial Sequence
  peptide linker
GGGGGKR

SEQ ID NO: 25 - protein, 7 aa, Artificial Sequence
  peptide linker
RRGGGGG

SEQ ID NO: 26 - protein, 9 aa, Artificial Sequence
  peptide linker
GGAPGDVKR

SEQ ID NO: 27 - protein, 9 aa, Artificial Sequence
  peptide linker
RRAPGDVGG

SEQ ID NO: 28 - protein, 9 aa, Artificial Sequence
  peptide linker
GGYPGDVKR

SEQ ID NO: 29 - protein, 9 aa, Artificial Sequence
  peptide linker
RRYPGDVGG

SEQ ID NO: 30 - protein, 9 aa, Artificial Sequence
  peptide linker
GGHPGDVKR

SEQ ID NO: 31 - protein, 9 aa, Artificial Sequence
  peptide linker
RRHPGDVGG

SEQ ID NO: 32 - protein, 7 aa, Artificial Sequence
  peptide linker
RRGPGGG

SEQ ID NO: 33 - protein, 51 aa, Artificial Sequence
  single chain human insulin analog
  MISC_FEATURE (49)..(49): Xaa at position 49 is 4-amino phenylalanine or 4-methoxy phenylalanine
FVNQHLCGSHLVEALYLVCGERGFFYTPKTGIVEQCCTSICSLYQLENXCN

SEQ ID NO: 34 - protein, 63 aa, Artificial Sequence
  single-chain human insulin analog
  MISC_FEATURE (61)..(61): Xaa at position 61 is 4-amino phenylalanine or 4-methoxy phenylalanine
FVNQHLCGSHLVEALYLVCGERGFFYTPKTQPLALEGSLQKRGIVEQCCTSICSLYQLENXCN

SEQ ID NO: 35 - protein, 7 aa, Artificial Sequence
  peptide linker
AGRGSGK

SEQ ID NO: 36 - protein, 7 aa, Artificial Sequence
  peptide linker
AGLGSGK

SEQ ID NO: 37 - protein, 7 aa, Artificial Sequence
  peptide linker
AGMGSGK

SEQ ID NO: 38 - protein, 7 aa, Artificial Sequence
  peptide linker
ASWGSGK

SEQ ID NO: 39 - protein, 7 aa, Artificial Sequence
  peptide linker
TGLGSGQ

SEQ ID NO: 40 - protein, 7 aa, Artificial Sequence
  peptide linker
TGLGRGK

SEQ ID NO: 41 - protein, 7 aa, Artificial Sequence
  peptide linker
TGLGSGK

SEQ ID NO: 42 - protein, 7 aa, Artificial Sequence
  peptide linker
HGLYSGK

SEQ ID NO: 43 - protein, 7 aa, Artificial Sequence
  peptide linker
KGLGSGQ

SEQ ID NO: 44 - protein, 7 aa, Artificial Sequence
  peptide linker
VGLMSGK

SEQ ID NO: 45 - protein, 7 aa, Artificial Sequence
  peptide linker
VGLSSGQ

SEQ ID NO: 46 - protein, 7 aa, Artificial Sequence
  peptide linker
VGLYSGK

SEQ ID NO: 47 - protein, 7 aa, Artificial Sequence
  peptide linker
VGLSSGK

SEQ ID NO: 48 - protein, 7 aa, Artificial Sequence
  peptide linker
VGMSSGK

SEQ ID NO: 49 - protein, 7 aa, Artificial Sequence
  peptide linker
VWSSSGK

SEQ ID NO: 50 - protein, 7 aa, Artificial Sequence
  peptide linker
VGSSSGK

SEQ ID NO: 51 - protein, 7 aa, Artificial Sequence
  peptide linker
VGMSSGK

SEQ ID NO: 52 - protein, 7 aa, Artificial Sequence
  peptide linker
TGLGSGR

SEQ ID NO: 53 - protein, 7 aa, Artificial Sequence
  peptide linker
TGLGKGQ

SEQ ID NO: 54 - protein, 7 aa, Artificial Sequence
  peptide linker
KGLSSGQ

SEQ ID NO: 55 - protein, 7 aa, Artificial Sequence
  peptide linker
VKLSSGQ

SEQ ID NO: 56 - protein, 7 aa, Artificial Sequence
  peptide linker
VKLSSGQ

SEQ ID NO: 57 - protein, 7 aa, Artificial Sequence
  peptide linker
TGLGKGQ

SEQ ID NO: 58 - protein, 7 aa, Artificial Sequence
  peptide linker
VGLSKGQ

SEQ ID NO: 59 - protein, 8 aa, Artificial Sequence
  glucagon analogue
  MOD_RES (1)..(1): Xaa at position 1 is d-lysine
  MOD_RES (2)..(2): Xaa at position 2 is d-sarcosine
  MOD_RES (3)..(3): Xaa at position 3 is d-histidine
  MOD_RES (4)..(4): Xaa at position 4 is d-threonine
  MOD_RES (5)..(5): Xaa at position 5 is d-arginine
  MOD_RES (7)..(7): Xaa at position 7 is d-threonine
  MOD_RES (8)..(8): d-phenylalanine
  MOD_RES (8)..(8): Xaa at position 8 is d-phenylalanine
XXXXXGXX

SEQ ID NO: 60 - protein, 8 aa, Homo sapiens
SRVSRRSR

SEQ ID NO: 61 - protein, 8 aa, Homo sapiens
GYGSSSRR

SEQ ID NO: 62 - protein, 8 aa, Homo sapiens
GSSSRRAP

SEQ ID NO: 63 - protein, 8 aa, Homo sapiens
  MISC_FEATURE (7)..(7): Xaa at position 7 is ornithine
GYGSSSXR

SEQ ID NO: 64 - protein, 12 aa, Homo sapiens
GAGSSSRRAPQT

SEQ ID NO: 65 - protein, 21 aa, Artificial Sequence
  Analog of the insulin B chain
  MISC_FEATURE (1)..(1): Xaa at position 1 is histidine or threonine
  MISC_FEATURE (6)..(6): Xaa at position 6 is histidine, aspartic acid, glutamic acid, homocysteic acid or cysteic acid
  MISC_FEATURE (18)..(18): Xaa at position 18 is alanine ornithine or arginine
XLCGAXLVDALYLVCGDXGFY

SEQ ID NO: 66 - protein, 8 aa, Homo sapiens
GYGSSSRR

SEQ ID NO: 67 - protein, 23 aa, Artificial Sequence
  Analog of the insulin B chain
  MISC_FEATURE (1)..(1): Xaa at position 1 is histidine or threonine
  MISC_FEATURE (5)..(5): Xaa at position 5 is alanine, glycine or serine
  MISC_FEATURE (6)..(6): Xaa at position 6 is histidine, aspartic acid, glutamic acid, homocysteic acid or cysteic acid
  MISC_FEATURE (9)..(9): Xaa at position 9 is histidine, aspartic acid or glutamic acid
  MISC_FEATURE (10)..(10): Xaa at position 10 is alanine or threonin
  MISC_FEATURE (17)..(17): Xaa at position 17 is glutamic acid, aspartic acid or asparagine
  MISC_FEATURE (18)..(18): Xaa at position 18 is alanine ornithine, lysine or arginine
  MISC_FEATURE (21)..(21): Xaa at position 21 is tyrosine or phenylalanine
XLCGXXLVXXLYLVCGXXGFXYT

SEQ ID NO: 68 - protein, 21 aa, Homo sapiens
GIVDECCFRSCDLRRLEMYCA

SEQ ID NO: 69 - protein, 29 aa, Homo sapiens
GPETLCGAELVDALYLVCGDRGFYFNKPT

SEQ ID NO: 70 - protein, 21 aa, Homo sapiens
GIVEECCFRSCDLALLETYCA

SEQ ID NO: 71 - protein, 32 aa, Homo sapiens
AYRPSETLCGGELVDTLQFVCGDRGFYFSRPA

SEQ ID NO: 72 - protein, 29 aa, Artificial Sequence
  glucagon analogue
  MISC_FEATURE (1)..(1): Xaa at position 1 = His, D-histidine, desaminohistidine, hydroxyl-histidine, acetyl-histidine, homo-histidine or alpha, alpha-dimethyl imidiazole acetic acid (DMIA), N-methyl histidine, alpha-methyl histidine, or imidazole acetic acid
  MISC_FEATURE (2)..(2): Xaa at position 2 = Ser, D-serine, Ala, D-alanine, Val, glycine, n-methyl serine, aminoisobutyric acid (AIB) or N-methyl alanine
  MISC_FEATURE (3)..(3): Xaa at position 3 is Gln, Glu, Orn or  Nle
  MISC_FEATURE (10)..(10): Xaa at position 10 = Tyr, Val or Trp
  MISC_FEATURE (12)..(12): Xaa at position 12 = Ser, Lys or Arg
  MISC_FEATURE (15)..(15): Xaa at position 15 = Asp, Glu, cysteic acid, homoglutamic acid and homocysteic acid
  MISC_FEATURE (16)..(16): Xaa at position 16 = Ser, Gly, Glu, Gln, homoglutamic acid or homocysteic acid
  MISC_FEATURE (17)..(17): Xaa at position 17 = Arg, Gln, Lys, Cys, Orn, homocycstein or acetyl phenylalanine
  MISC_FEATURE (18)..(18): Xaa at position 18 = Arg, Ala,Lys, Cys, Orn, homocycstein or acetyl phenylalanine
  MISC_FEATURE (20)..(20): Xaa at position 20 = Gln, Lys, arginine, ornithine or citrulline
  MISC_FEATURE (21)..(21): Xaa at position 21 = Gln, Glu, Asp, Lys, Cys, Orn, homocycstein or acetyl phenyalanine
  MISC_FEATURE (23)..(23): Xaa at position 23 is Val or Ile
  MISC_FEATURE (24)..(24): Xaa at position 24 = Ala, Gln, Glu, Lys, Cys, Orn, homocycstein or acetyl phenyalanine
  MISC_FEATURE (27)..(27): Xaa at position 27 = Met, Leu, Val or Nle
  MISC_FEATURE (28)..(28): Xaa at position 28 = Asn, Lys or Asp
  MISC_FEATURE (29)..(29): Xaa at position 29 is Thr, Gly, Lys, Cys, Orn, homocycstein or acetyl phenyalanine
XXXGTFTSDXSXYLXXXXAXXFXXWLXXX

SEQ ID NO: 73 - protein, 21 aa, Artificial Sequence
  Analog of Insulin A chain
  MISC_FEATURE (8)..(8): Xaa at position 8 is  threonine or histidine
  MISC_FEATURE (9)..(9): Xaa at position 9 is  valine or tyrosine
  misc_feature (19)..(19): Xaa can be any naturally occurring amino acid
  MISC_FEATURE (21)..(21): Xaa at position 21 is asparagine or glycine
GIVEQCCXXICSLYQLENXCX

SEQ ID NO: 74 - protein, 21 aa, Artificial Sequence
  Analog of the insulin A chain
  MISC_FEATURE (8)..(8): Xaa at position 8 is histidine or phenylalnine
  MISC_FEATURE (9)..(9): Xaa at position 9 is arginine, lysine, ornithine or alanine
  MISC_FEATURE (19)..(19): Xaa at position19 is tyrosine, 4-methoxy phenylalanine  or 4-amino-phenylalanine
  MISC_FEATURE (21)..(21): Xaa at position 21 is alanine, glycine or asparagine
GIVDECCXXSCDLRRLEMXCX

SEQ ID NO: 75 - protein, 21 aa, Artificial Sequence
  Analog of the insulin B chain
  MISC_FEATURE (1)..(1): Xaa at position 1 is histidine or threonine
  MISC_FEATURE (6)..(6): Xaa at position 6 is histidine, aspartic acid, glutamic acid, homocysteic acid or cysteic acid
  MISC_FEATURE (18)..(18): Xaa at position 18 is alanine, ornithine, lysine or arginine
  misc_feature (21)..(21): Xaa can be any naturally occurring amino acid
XLCGAXLVDALYLVCGDXGFX

SEQ ID NO: 76 - protein, 8 aa, Artificial Sequence
  Analog of IGF-1 C peptide
  MISC_FEATURE (7)..(8): The Xaas at positions 7 and 8 are independently arginine, lysine or ornithine
GAGSSSXX

SEQ ID NO: 77 - protein, 12 aa, Artificial Sequence
  Analog of IGF-1 C peptide
  MISC_FEATURE (7)..(8): The Xaas at positions 7 and 8 are independently arginine, lysine or ornithine
GYGSSSXXAPQT

SEQ ID NO: 78 - protein, 10 aa, Artificial Sequence
  peptide fragment representing the carboxy terminal 10 amino acids of Exendin-4
GPSSGAPPPS

SEQ ID NO: 79 - protein, 10 aa, Artificial Sequence
  peptide fragment representing the carboxy terminal 10 amino acids of Exendin-4
  MOD_RES (10)..(10): AMIDATION
GPSSGAPPPS

SEQ ID NO: 80 - protein, 11 aa, Artificial Sequence
  peptide fragment representing the carboxy terminal 10 amino acids of Exendin-4
  MISC_FEATURE (11)..(11): pegylated
GPSSGAPPPSC

SEQ ID NO: 81 - protein, 29 aa, Homo sapiens
  MISC_FEATURE (15)..(15): Xaa at position 15 = Asp, Glu, homoglutamic acid, cysteic acid or homocysteic acid
  MISC_FEATURE (16)..(16): Xaa at position 16 = Ser, Glu, Gln, homoglutamic acid or homocysteic acid
  MISC_FEATURE (20)..(20): Xaa at position 20 = Gln or Lys
  MISC_FEATURE (24)..(24): Xaa at position 24 = Gln or Glu
  MISC_FEATURE (28)..(28): Xaa at position 28 = Asn, Lys or an acidic amino acid
  MISC_FEATURE (29)..(29): Xaa at position 29 = Thr, Gly or an acidic amino acid
HSQGTFTSDYSKYLXXRRAXDFVXWLMXX

SEQ ID NO: 82 - protein, 29 aa, Homo sapiens
  MISC_FEATURE (15)..(15): Xaa at position 15 = Asp, Glu, cysteic acid, homoglutamic acid or homocysteic acid
  MISC_FEATURE (16)..(16): Xaa at position 16 = Ser, Glu, Gln, homoglutamic acid or homocysteic acid
  MISC_FEATURE (20)..(20): Xaa at position 20 = Gln or Lys
  MISC_FEATURE (24)..(24): Xaa at position 24 = Gln or Glu
  MISC_FEATURE (28)..(28): Xaa at position 28 = Asn, Asp or Lys
  MISC_FEATURE (29)..(29): Xaa at position 29 is Thr or Gly
HSQGTFTSDYSKYLDXRRAXDFVXWLMXX

SEQ ID NO: 83 - protein, 29 aa, Artificial Sequence
  glucagon analogue
  MISC_FEATURE (3)..(3): Xaa at position 3= Glu, Orn or Nle
  MISC_FEATURE (15)..(15): Xaa at position 15 = Asp, Glu, homoglutamic acid, cysteic acid or homocysteic acid
  MISC_FEATURE (16)..(16): Xaa at position 16 = Ser, Glu, Gln, homoglutamic acid or homocysteic acid
  MISC_FEATURE (20)..(20): Xaa at position 20 = Gln or Lys
  MISC_FEATURE (24)..(24): Xaa at position 24 = Gln or Glu
  MISC_FEATURE (28)..(28): Xaa at position 28 = Asn, Lys or an acidic amino acid
  MISC_FEATURE (29)..(29): Xaa at position 29 = Thr or an acidic amino acid
HSXGTFTSDYSKYLXXRRAXDFVXWLMXX

SEQ ID NO: 84 - protein, 29 aa, Artificial Sequence
  Glucagon analogue
  MISC_FEATURE (15)..(15): Xaa at position 15 is Glu or Asp
  MISC_FEATURE (28)..(28): Xaa at position 28 is Glu or Asp
  MOD_RES (29)..(29): AMIDATION
HSQGTFTSDYSKYLXERRAQDFVQWLMXT

SEQ ID NO: 85 - protein, 29 aa, Artificial Sequence
  glucagon analogue
  MISC_FEATURE (12)..(16): lactam ring formed between side chain of Lys 12 and Glu 16
  MISC_FEATURE (15)..(15): Xaa at position 15 is Glu or Asp
  MISC_FEATURE (28)..(28): Xaa at position 28 is Glu or Asp
  MOD_RES (29)..(29): AMIDATION
HSQGTFTSDYSKYLXERRAQDFVQWLMXT

SEQ ID NO: 86 - protein, 29 aa, Artificial Sequence
  glucagon analogue
  MISC_FEATURE (15)..(15): Xaa at position 15 is Glu or Asp
  MISC_FEATURE (16)..(20): lactam ring formed between side chain of Glu 16 and Lys 20
  MISC_FEATURE (28)..(28): Xaa at position 28 is Glu or Asp
  MOD_RES (29)..(29): AMIDATION
HSQGTFTSDYSKYLXERRAKDFVQWLMXT

SEQ ID NO: 87 - protein, 29 aa, Artificial Sequence
  glucagon analogue
  MISC_FEATURE (15)..(15): Xaa at position 15 is Glu or Asp
  MISC_FEATURE (20)..(24): lactam ring formed between side chain of Lys 20 and Glu 24
  MISC_FEATURE (28)..(28): Xaa at position 28 is Glu or Asp
  MOD_RES (29)..(29): AMIDATION
HSQGTFTSDYSKYLXSRRAKDFVEWLMXT

SEQ ID NO: 88 - protein, 29 aa, Artificial Sequence
  glucagon analogue
  MISC_FEATURE (15)..(15): Xaa at position 15 is Glu or Asp
  MISC_FEATURE (24)..(28): lactam ring formed between side chain of Glu 24 and Lys 28
  MISC_FEATURE (29)..(29): Xaa at position 29 is Glu or Thr
  MOD_RES (29)..(29): AMIDATION
HSQGTFTSDYSKYLXSRRAQDFVEWLMKX

SEQ ID NO: 89 - protein, 29 aa, Homo sapiens
  MISC_FEATURE (27)..(27): Xaa at position 27 is Met, Leu or Nle
HSQGTFTSDYSKYLDSRRAQDFVQWLXNT

SEQ ID NO: 90 - protein, 29 aa, Artificial Sequence
  glucagon analogue
  MISC_FEATURE (16)..(16): Xaa is Glu, Gln, homoglutamic acid or homocysteic acid
  MISC_FEATURE (17)..(17): Xaa is Arg, Cys, Orn, homocysteine or acetyl phenylalanine
  MISC_FEATURE (27)..(27): Xaa at position 27 is Met, Leu or Nle
HSQGTFTSDYSKYLDXXRAQDFVQWLXNT

SEQ ID NO: 91 - protein, 29 aa, Artificial Sequence
  Glucagon analogue
  MISC_FEATURE (16)..(16): Xaa is Glu, Gln, homoglutamic acid or homocysteic acid
  MISC_FEATURE (21)..(21): Xaa is Asp, Cys, Orn, homocysteine or acetyl phenyalanine
  MISC_FEATURE (27)..(27): Xaa at position 27 is Met, Leu or Nle
HSQGTFTSDYSKYLDXRRAQXFVQWLXNT

SEQ ID NO: 92 - protein, 29 aa, Artificial Sequence
  glucagon analog
  MISC_FEATURE (16)..(16): Xaa is Glu, Gln, homoglutamic acid or homocysteic acid
  MISC_FEATURE (24)..(24): Xaa is Gln, Cys, Orn, homocysteine or acetyl phenylalanine
  MISC_FEATURE (27)..(27): Xaa at postion 27 is Met, Leu or Nle
HSQGTFTSDYSKYLDXRRAQDFVXWLXNT

SEQ ID NO: 93 - protein, 29 aa, Artificial Sequence
  Glucagon analogue
  MISC_FEATURE (16)..(16): Xaa is Glu, Gln, homoglutamic acid or homocysteic acid
  MISC_FEATURE (21)..(21): Xaa is Asp, Cys, Orn, homocysteine or acetyl phenyalanine
  MISC_FEATURE (24)..(24): Xaa is Gln, Cys, Orn, homocysteine or acetyl phenyalanine
  MISC_FEATURE (27)..(27): Xaa at position 27 is Met, Leu or Nle
HSQGTFTSDYSKYLDXRRAQXFVXWLXNT

SEQ ID NO: 94 - protein, 29 aa, Artificial Sequence
  Glucagon analogue
  MISC_FEATURE (21)..(21): Xaa is Asp, Cys, Orn, homocysteine or acetyl phenyalanine
  MISC_FEATURE (27)..(27): Xaa is Met, Leu or Nle
HSQGTFTSDYSKYLDERRAQXFVQWLXNT

SEQ ID NO: 95 - protein, 29 aa, Artificial Sequence
  Glucagon analogue
  MISC_FEATURE (24)..(24): Xaa at position 24 is Gln, Cys, Orn, homocysteine or acetyl phenylalanine
  MISC_FEATURE (27)..(27): Xaa at position 27 is Met, Leu or Nle
HSQGTFTSDYSKYLDERRAQDFVXWLXNT

SEQ ID NO: 96 - protein, 29 aa, Artificial Sequence
  Glucagon analogue
  MISC_FEATURE (16)..(16): Xaa at position 16 is Glu, Gln, homoglutamic acid or homocysteic acid
HSQGTFTSDYSKYLDXRRAQDFVQWLMNT

SEQ ID NO: 97 - protein, 29 aa, Artificial Sequence
  Glucagon analogue
  MISC_FEATURE (27)..(27): Xaa at position 27 = Met, Leu or Nle
HSQGTFTSDYSKYLDERRAQDFVQWLXNT

SEQ ID NO: 98 - protein, 29 aa, Artificial Sequence
  Glucagon analogue
HSQGTFTSDYSKYLDERRAQDFVQWLMNT

SEQ ID NO: 99 - protein, 29 aa, Artificial Sequence
  Glucagon analogue
  MOD_RES (29)..(29): AMIDATION
HSQGTFTSDYSKYLDERRAQDFVQWLMNT

SEQ ID NO: 100 - protein, 29 aa, Artificial Sequence
  glucagon analogue
  MISC_FEATURE (12)..(16): lactam ring formed between side chain of Lys 12 and Glu 16
HSQGTFTSDYSKYLDERRAQDFVQWLMNT

SEQ ID NO: 101 - protein, 29 aa, Artificial Sequence
  glucagon analogue
  MISC_FEATURE (16)..(20): lactam ring formed between side chain of Glu 16 and Lys 20
HSQGTFTSDYSKYLDERRAKDFVQWLMNT

SEQ ID NO: 102 - protein, 29 aa, Artificial Sequence
  glucagon analogue
  MISC_FEATURE (20)..(24): lactam ring formed between side chain of Lys 20 and Glu 24
HSQGTFTSDYSKYLDSRRAKDFVEWLMNT

SEQ ID NO: 103 - protein, 29 aa, Homo sapiens
  MISC_FEATURE (24)..(28): lactam ring formed between side chain of Glu 24 and Lys 28
HSQGTFTSDYSKYLDSRRAQDFVEWLMKT

SEQ ID NO: 104 - protein, 29 aa, Homo sapiens
  MISC_FEATURE (12)..(16): lactam ring formed between side chain of Lys 12 and Glu 16
  MISC_FEATURE (20)..(24): lactam ring formed between side chain of Lys 20 and Glu 24
HSQGTFTSDYSKYLDERRAKDFVEWLMNT

SEQ ID NO: 105 - protein, 29 aa, Homo sapiens
  MISC_FEATURE (16)..(20): lactam ring formed between side chain of Lys 12 and Glu 16
  MISC_FEATURE (24)..(28): lactam ring formed between side chain of Glu 24 and Lys 28
HSQGTFTSDYSKYLDERRADDFVEWLMKT

SEQ ID NO: 106 - protein, 29 aa, Homo sapiens
  MISC_FEATURE (16)..(20): lactam ring formed between side chain of Glu 16 and Lys 20
  MISC_FEATURE (24)..(28): lactam ring formed between side chain of Glu 24 and Lys 28
HSQGTFTSDYSKYLDERRAKDFVEWLMKT

SEQ ID NO: 107 - protein, 30 aa, Artificial Sequence
  Glucagon analogue
  MISC_FEATURE (30)..(30): Xaa = any amino acid
  MOD_RES (30)..(30): AMIDATION
HSQGTFTSDYSKYLDERRAQDFVQWLMNTX

SEQ ID NO: 108 - protein, 29 aa, Homo sapiens
  MISC_FEATURE (16)..(16): Xaa at position 16 = Ser, Glu, Gln, homoglutamic acid or homocysteic acid
  MISC_FEATURE (20)..(20): Xaa at position 20 = glutamine, lysine, arginine, ornithine or citrulline
  MISC_FEATURE (24)..(24): Xaa at position 24 = Gln or Glu
  MISC_FEATURE (28)..(28): Xaa at position 28 = Asn, Asp or Lys
  MISC_FEATURE (29)..(29): Xaa at position 29 = Thr or Gly
HSQGTFTSDYSKYLDXRRAXDFVXWLMXX

SEQ ID NO: 109 - protein, 29 aa, Artificial Sequence
  glucagon analogue
  MISC_FEATURE (12)..(16): lactam ring formed between side chain of Lys 12 and Glu 16
  MISC_FEATURE (28)..(28): Xaa at position 28 is Asp or Asn
  MISC_FEATURE (29)..(29): Xaa at position 29 is Thr or Gly
HSQGTFTSDYSKYLDERRAQDFVQWLMXX

SEQ ID NO: 110 - protein, 29 aa, Artificial Sequence
  glucagon analogue
  MISC_FEATURE (16)..(20): lactam ring formed between side chain of Glu 16 and Lys 20
  MISC_FEATURE (28)..(28): Xaa at position 28 is Asp or Asn
  MISC_FEATURE (29)..(29): Xaa at position 29 is Thr or Gly
HSQGTFTSDYSKYLDERRAKDFVQWLMXX

SEQ ID NO: 111 - protein, 29 aa, Artificial Sequence
  glucagon analogue
  MISC_FEATURE (20)..(24): lactam ring formed between side chain of Lys 20 and Glu 24
  MISC_FEATURE (28)..(28): Xaa at position 28 is Asp or Asn
  MISC_FEATURE (29)..(29): Xaa at position 29 is Thr or Gly
HSQGTFTSDYSKYLDSRRAKDFVEWLMXX

SEQ ID NO: 112 - protein, 29 aa, Artificial Sequence
  glucagon analogue
  MISC_FEATURE (24)..(28): lactam ring formed between side chain of Glu 24 and Lys 28
  MISC_FEATURE (29)..(29): Xaa at position 29 is Thr or Gly
HSQGTFTSDYSKYLDSRRAQDFVEWLMKX

SEQ ID NO: 113 - protein, 29 aa, Homo sapiens
  MISC_FEATURE (16)..(16): Xaa at position 16 = Ser, Glu, Gln, homoglutamic acid or homocysteic acid
  MISC_FEATURE (20)..(20): Xaa at position 20 = glutamine, lysine, arginine, ornithine or citrulline
  MISC_FEATURE (24)..(24): Xaa at position 24 = Gln or Glu
  MISC_FEATURE (28)..(28): Xaa at position 28 = Asn, Asp or Lys
  MISC_FEATURE (29)..(29): Xaa at position 29 = Thr or Gly
HSQGTFTSDYSKYLDXRRAXDFVXWLMXX

SEQ ID NO: 114 - protein, 29 aa, Homo sapiens
HSQGTFTSDYSKYLDERRAKDFVQWLMNT

SEQ ID NO: 115 - protein, 29 aa, Artificial Sequence
  glucagon analogue
HSQGTFTSDYSKYLDSRRAKDFVEWLMNT

SEQ ID NO: 116 - protein, 29 aa, Artificial Sequence
  glucagon analogue
HSQGTFTSDYSKYLDSRRAQDFVEWLMKT

SEQ ID NO: 117 - protein, 8 aa, Artificial Sequence
  peptide fragment representing the carboxy terminal 8 amino acids of oxyntomodulin
KRNRNNIA

SEQ ID NO: 118 - protein, 4 aa, Artificial Sequence
  peptide fragment representing the amino 4 amino acids of oxyntomodulin carboxy terminus of SEQ ID NO: 27
KRNR

SEQ ID NO: 119 - protein, 29 aa, homo sapiens
HSQGTFTSDYSKYLDERRAKDFVQWLMNT

SEQ ID NO: 120 - protein, 29 aa, Artificial Sequence
  glucagon analogue
  MISC_FEATURE (1)..(1): Xaa at position 1 = His, D-histidine, desaminohistidine, hydroxyl-histidine, acetyl-histidine, homo-histidine or alpha, alpha-dimethyl imidiazole acetic acid (DMIA), N-methyl histidine, alpha-methyl histidine, or imidazole acetic acid
  MISC_FEATURE (2)..(2): Xaa at position 2 = Ser, D-serine, Ala, D-alanine, Val, glycine, n-methyl serine, aminoisobutyric acid (AIB) or N-methyl alanine
  MISC_FEATURE (3)..(3): Xaa at position 3 is Gln, Glu, Orn or  Nle
  MISC_FEATURE (15)..(15): Xaa at position 15 = Asp, Glu, cysteic acid, homoglutamic acid and homocysteic acid
  MISC_FEATURE (16)..(16): Xaa at position 16 = Ser, Glu, Gln, homoglutamic acid or homocysteic acid
  MISC_FEATURE (20)..(20): Xaa at position 20 = Gln, Lys, arginine, ornithine or citrulline
  MISC_FEATURE (21)..(21): Xaa at position 21 = Gln, Glu, Asp, Lys, Cys, Orn, homocycstein or acetyl phenyalanine
  MISC_FEATURE (23)..(23): Xaa at position 23 is Val or Ile
  MISC_FEATURE (24)..(24): Xaa at position 24 = Ala, Gln, Glu, Lys, Cys, Orn, homocycstein or acetyl phenyalanine
  MISC_FEATURE (27)..(27): Xaa at position 27 = Met, Leu or Nle
  MISC_FEATURE (28)..(28): Xaa at position 28 = Asn, Lys or Asp
  MISC_FEATURE (29)..(29): Xaa at position 29 is Thr or Gly, Lys, Cys, Orn, homocycstein or acetyl phenyalanine
XXXGTFTSDYSKYLXXRRAXXFXXWLXXX

SEQ ID NO: 121 - protein, 38 aa, Artificial Sequence
  glucagon analogue
  MISC_FEATURE (15)..(15): Xaa at position 15 = Asp, Glu, homoglutamic acid, cysteic acid or homocysteic acid
  MISC_FEATURE (16)..(16): Xaa at position 16 = Ser, Glu, Gln, homoglutamic acid or homocysteic acid
  MISC_FEATURE (20)..(20): Xaa at position 20 = Gln or Lys
  MISC_FEATURE (24)..(24): Xaa at position 24 = Gln or Glu
  MISC_FEATURE (28)..(28): Xaa at position 28 = Asn, Lys or Asp
HSQGTFTSDYSKYLXXRRAXDFVXWLMXGGPSSGPPPS

SEQ ID NO: 122 - protein, 29 aa, Artificial Sequence
  glucagon analogue
  MISC_FEATURE (16)..(16): Xaa at position 16 = Ser, Glu, Gln, homoglutamic acid or homocysteic acid
  MISC_FEATURE (20)..(20): Xaa at position 20 = Gln or Lys
  MISC_FEATURE (21)..(21): Xaa at position 21 = Asp, Lys, Cys, Orn, homocycstein or acetyl phenyalanine
  MISC_FEATURE (24)..(24): Xaa at position 24 = Gln, Lys, Cys, Orn, homocycstein or acetyl phenyalanine
  MISC_FEATURE (27)..(27): Xaa at position 27 = Met, Leu or Nle
HSQGTFTSDYSKYLDXRRAXXFVXWLXNT

SEQ ID NO: 123 - protein, 29 aa, Artificial Sequence
  glucagon analogue
  MISC_FEATURE (15)..(15): Xaa at position 15 = Asp, Glu, homoglutamic acid, cysteic acid or homocysteic acid
  MISC_FEATURE (16)..(16): Xaa at position 16 = Ser, Glu, Gln, homoglutamic acid or homocysteic acid
  MISC_FEATURE (20)..(20): Xaa at position 20 = Gln, Lys, Arg, Orn, or citrulline
  MISC_FEATURE (21)..(21): Xaa at position 21 = Asp, Glu, homoglutamic acid, or homocysteic acid
  MISC_FEATURE (24)..(24): Xaa at position 24 = Gln or Glu
  MISC_FEATURE (28)..(28): Xaa at position 28 = Asn, Lys or an acidic amino acid
  MISC_FEATURE (29)..(29): Xaa at position 29 = Thr, Gly or an acidic amino acid
HSQGTFTSDYSKYLXXRRAXXFVXWLMXX

SEQ ID NO: 124 - protein, 29 aa, Homo sapiens
HSQGTFTSDYSKYLDERRAKDFVQWLMNT

SEQ ID NO: 125 - protein, 29 aa, Artificial Sequence
  glucagon analogue
HSQGTFTSDYSKYLDSRRAKDFVEWLMNT

SEQ ID NO: 126 - protein, 29 aa, Artificial Sequence
  glucagon analogue
HSQGTFTSDYSKYLDSRRAQDFVEWLMKT

SEQ ID NO: 127 - protein, 29 aa, Artificial Sequence
  Glucagon analogue
  MISC_FEATURE (2)..(2): Xaa is d-serine, alanine, glycine, n-methyl serine and aminoisobutyric acid
  MOD_RES (29)..(29): AMIDATION
HXQGTFTSDYSKYLDERRAQDFVQWLMNT

SEQ ID NO: 128 - protein, 29 aa, Artificial Sequence
  Glucagon analogue
  MISC_FEATURE (2)..(2): Xaa is aminoisobutyric acid
  MOD_RES (29)..(29): AMIDATION
HXQGTFTSDYSKYLDERRAQDFVQWLMNT

SEQ ID NO: 129 - protein, 39 aa, Artificial Sequence
  Glucagon analogue
  MISC_FEATURE (27)..(27): Xaa is Met, Leu or Nle
HSQGTFTSDYSKYLDERRAQDFVQWLXNTGPSSGAPPPS

SEQ ID NO: 130 - protein, 37 aa, Artificial Sequence
  Glucagon analogue
  MISC_FEATURE (27)..(27): Xaa is Met, Leu or Nle
HSQGTFTSDYSKYLDERRAQDFVQWLXNTKRNRNNIA

SEQ ID NO: 131 - protein, 33 aa, Artificial Sequence
  Glucagon analogue
  MISC_FEATURE (27)..(27): Xaa is Met, Leu or Nle
HSQGTFTSDYSKYLDERRAQDFVQWLXNTKRNR

SEQ ID NO: 132 - protein, 88 aa, Artificial Sequence
  Insulin conjugate
HAEGTFTSDVSSYLEEQAAREFIAWLVRGRGGPEHLCGAHLVDALYLVCGDRGFYFNDRGAGSSSRRGIVDECCHRSCDLRRLENYCN

SEQ ID NO: 133 - protein, 88 aa, Artificial Sequence
  Insulin conjugate
HAEGTFTSDVSSYLEEQAAREFIAWLVRGRGGPEHLCGAHLVDALYLVCGDRGFYFNDRGAGSSSRRGIVDECCHRSCDLRRLENACN

SEQ ID NO: 134 - protein, 88 aa, Artificial Sequence
  Insulin conjugate
HAEGTFTSDVSSYLEEQAAREAIAWLVRGRGGPEHLCGAHLVDALYLVCGDRGFYFNDRGAGSSSRRGIVDECCHRSCDLRRLENYCN

SEQ ID NO: 135 - protein, 86 aa, Artificial Sequence
  Insulin conjugate
HSQGTFTSDYSKYLDSRRAQDFVQWLMNTGPEHLCGAHLVDALYLVCGDRGFYFNDRGAGSSSRRGIVDECCHRSCDLRRLENYCN

SEQ ID NO: 136 - protein, 86 aa, Artificial Sequence
  Insulin conjugate
HSQGTFTSDYSKYLDSRRAQDFVQWLMNTGPEHLCGAHLVDALYLVCGDRGFYFNDRGAGSSSRRGIVDECCHRSCDLRRLENACN

SEQ ID NO: 137 - protein, 86 aa, Artificial Sequence
  Insulin conjugate
HSEGTFTSDYSKYLDSRRAQDFVQWLMNTGPEHLCGAHLVDALYLVCGDRGFYFNDRGAGSSSRRGIVDECCHRSCDLRRLENYCN

SEQ ID NO: 138 - protein, 86 aa, Artificial Sequence
  Insulin conjugate
HSQGTFTSDYSKYLDERRAQDFVQWLMNTGPEHLCGAHLVDALYLVCGDRGFYFNDRGAGSSSRRGIVDECCHRSCDLRRLENYCN

SEQ ID NO: 139 - protein, 90 aa, Artificial Sequence
  Conjugate of GLP-1 and insulin
HAEGTFTSDVSSYLEEQAAREFIAWLVRGRGFVNQHLCGSHLVEALYLVCGERGFFYTPKTGAGSSSRRGIVEQCCTSICSLYQLENYCN

SEQ ID NO: 140 - protein, 88 aa, Artificial Sequence
  Conjugate of glucagon and insulin
HSQGTFTSDYSKYLDSRRAQDFVQWLMNTFVNQHLCGSHLVEALYLVCGERGFFYTPKTGAGSSSRRGIVEQCCTSICSLYQLENYCN

SEQ ID NO: 141 - protein, 35 aa, Homo sapiens
RREAEDLQVGQVELGGGPGAGSLQPLALEGSLQKR

SEQ ID NO: 142 - protein, 23 aa, Artificial Sequence
  Analog of the insulin B chain
  MISC_FEATURE (1)..(1): Xaa at position 1 is histidine or threonine
  MISC_FEATURE (5)..(5): Xaa at position 5 is alanine, glycine or serine
  MISC_FEATURE (6)..(6): Xaa at position 6 is histidine, aspartic acid, glutamic acid, homocysteic acid or cysteic acid
  MISC_FEATURE (9)..(9): Xaa at position 9 is aspartic acid, glutamine or glutamic acid
  MISC_FEATURE (10)..(10): Xaa at position 10 is alanine or threonine
  MISC_FEATURE (17)..(17): Xaa at position 12 is glutamic acid, aspartic acid or asparagine
  MISC_FEATURE (18)..(18): Xaa at position 18 is alanine, ornithine, lysine or arginine
  MISC_FEATURE (21)..(21): Xaa at position 21 is tyrosine or 4-amino-phenylalanine
XLCGXXLVXXLYLVCGXXGFXYT

SEQ ID NO: 143 - protein, 59 aa, Artificial Sequence
  Single chain insulin analog
FVNQHLCGSHLVEALYLVCGERGFFYTPKTGAGSSSRRGIVEQCCTSICSLYQLENYCN

SEQ ID NO: 144 - protein, 57 aa, Artificial Sequence
  Single chain insulin analog
  MISC_FEATURE (4)..(4): Xaa at position 4 is histidine or threonine
  MISC_FEATURE (9)..(9): Xaa at position 9 is ihistidine, aspartic acid, glutamic acid, homocysteic acid or cysteic acid
  MISC_FEATURE (21)..(21): Xaa at position 21 is alanine ornithine or arginine
  MISC_FEATURE (27)..(27): Xaa at position 21 is lysine or aspartic acid
  MISC_FEATURE (28)..(28): Xaa at position 21 is proline, ornithine or arginine
  MISC_FEATURE (44)..(44): Xaa at position 21 is phenylalanine or histidine
GPEXLCGAXLVDALYLVCGDXGFYFNXXGAGSSSRRGIVDECCXRSCDLRRLENYCN

SEQ ID NO: 145 - protein, 57 aa, Artificial Sequence
  Single chain insulin analog
GPEHLCGAHLVDALYLVCGDRGFYFNDRGAGSSSRRGIVDECCHRSCDLRRLENYCN

SEQ ID NO: 146 - protein, 29 aa, Artificial Sequence
  glucagon analog
  MISC_FEATURE: c-term amidation
  MISC_FEATURE (12)..(16): Lactam ring between side chains at positions 12 and 16
HSEGTFTSDYSKYLDERAAQDFVQWLMNT

SEQ ID NO: 147 - protein, 29 aa, Artificial Sequence
  glucagon analog
  MISC_FEATURE: c-term amidation
  MISC_FEATURE (12)..(16): Lactam ring between side chains at positions 12 and 16
HSEGTFTSDYSKYLDERAAKDFVQWLMNT

SEQ ID NO: 148 - protein, 29 aa, Artificial Sequence
  glucagon analog
  MISC_FEATURE: c-term amidation
  MISC_FEATURE (16)..(20): Lactam ring between side chains at positions 16 and 20
HSEGTFTSDYSKYLDKRAAEDFVQWLMNT

SEQ ID NO: 149 - protein, 29 aa, Artificial Sequence
  glucagon analog
  MISC_FEATURE: c-term amidation
HSEGTFTSDYSKYLDEQAAKEFIAWLMNT

SEQ ID NO: 150 - protein, 29 aa, Artificial Sequence
  glucagon analog
  MISC_FEATURE: c-term amidation
  MISC_FEATURE (12)..(16): Lactam ring between side chains at positions 12 and 16
HSEGTFTSDYSKYLDEQAAKEFIAWLMNT

SEQ ID NO: 151 - protein, 29 aa, Artificial Sequence
  glucagon analog
  MISC_FEATURE: c-term amidation
  MISC_FEATURE (16)..(20): Lactam ring between side chains at positions 16 and 20
HSEGTFTSDYSKYLDEQAAKEFIAWLMNT

SEQ ID NO: 152 - protein, 29 aa, Artificial Sequence
  glucagon analog
  MISC_FEATURE: c-term amidation
HSEGTFTSDYSKYLDEQAAKEFIAWLVKG

SEQ ID NO: 153 - protein, 29 aa, Artificial Sequence
  glucagon analog
  MISC_FEATURE: c-term amidation
  MISC_FEATURE (12)..(16): Lactam ring between side chains at positions 12 and 16
HSEGTFTSDYSKYLDEQAAKEFIAWLVKG

SEQ ID NO: 154 - protein, 29 aa, Artificial Sequence
  glucagon analog
  MISC_FEATURE: c-term amidation
  MISC_FEATURE (16)..(20): Lactam ring between side chains at positions 16 and 20
HSEGTFTSDYSKYLDEQAAKEFIAWLVKG

SEQ ID NO: 155 - protein, 29 aa, Artificial Sequence
  glucagon analog
  MISC_FEATURE: c-term amidation
  MOD_RES (1)..(1): (Des-amino)His
XSEGTFTSDYSKYLDERRAQDFVQWLMNT

SEQ ID NO: 156 - protein, 29 aa, Artificial Sequence
  glucagon analog
  MISC_FEATURE: c-term amidation
  MOD_RES (1)..(1): (Des-amino)His
XSEGTFTSDYSKYLDERRAKDFVQWLMNT

SEQ ID NO: 157 - protein, 29 aa, Artificial Sequence
  glucagon analog
  MISC_FEATURE: c-term amidation
  MOD_RES (1)..(1): (Des-amino)His
  MISC_FEATURE (16)..(20): Lactam ring between side chains at positions 16 and 20
XSEGTFTSDYSKYLDERRAKDFVQWLMNT

SEQ ID NO: 158 - protein, 29 aa, Artificial Sequence
  glucagon analog
  MISC_FEATURE: c-term amidation
  MOD_RES (1)..(1): (Des-amino)His
  MISC_FEATURE (12)..(16): Lactam ring between side chains at positions 12 and 16
XSEGTFTSDYSKYLDERRAQDFVQWLMNT

SEQ ID NO: 159 - protein, 29 aa, Artificial Sequence
  glucagon analog
  MISC_FEATURE: c-term amidation
  MOD_RES (1)..(1): (Des-amino)His
  MISC_FEATURE (12)..(16): Lactam ring between side chains at positions 12 and 16
XSEGTFTSDYSKYLDERRAKDFVQWLMNT

SEQ ID NO: 160 - protein, 29 aa, Artificial Sequence
  glucagon analog
  MISC_FEATURE: c-term amidation
  MOD_RES (1)..(1): (Des-amino)His
  MISC_FEATURE (16)..(20): Lactam ring between side chains at positions 16 and 20
XSEGTFTSDYSKYLDKRRAEDFVQWLMNT

SEQ ID NO: 161 - protein, 29 aa, Artificial Sequence
  glucagon analog
  MISC_FEATURE: c-term amidation
  MOD_RES (1)..(1): (Des-amino)His
XSEGTFTSDYSKYLDERAAKDFVQWLMNT

SEQ ID NO: 162 - protein, 29 aa, Artificial Sequence
  glucagon analog
  MISC_FEATURE: c-term amidation
  MOD_RES (1)..(1): (Des-amino)His
  MISC_FEATURE (16)..(20): Lactam ring between side chains at positions 16 and 20
XSEGTFTSDYSKYLDERAAKDFVQWLMNT

SEQ ID NO: 163 - protein, 29 aa, Artificial Sequence
  glucagon analog
  MISC_FEATURE: c-term amidation
  MOD_RES (1)..(1): (Des-amino)His
  MISC_FEATURE (12)..(16): Lactam ring between side chains at positions 12 and 16
XSEGTFTSDYSKYLDERAAQDFVQWLMNT

SEQ ID NO: 164 - protein, 29 aa, Artificial Sequence
  glucagon analog
  MISC_FEATURE: c-term amidation
  MOD_RES (1)..(1): (Des-amino)His
  MISC_FEATURE (12)..(16): Lactam ring between side chains at positions 12 and 16
XSEGTFTSDYSKYLDERAAKDFVQWLMNT

SEQ ID NO: 165 - protein, 29 aa, Artificial Sequence
  glucagon analog
  MISC_FEATURE: c-term amidation
  MOD_RES (1)..(1): (Des-amino)His
  MISC_FEATURE (16)..(20): Lactam ring between side chains at positions 16 and 20
XSEGTFTSDYSKYLDKRAAEDFVQWLMNT

SEQ ID NO: 166 - protein, 29 aa, Artificial Sequence
  glucagon analog
  MISC_FEATURE: c-term amidation
  MOD_RES (1)..(1): (Des-amino)His
XSEGTFTSDYSKYLDEQAAKEFIAWLMNT

SEQ ID NO: 167 - protein, 29 aa, Artificial Sequence
  glucagon analog
  MISC_FEATURE: c-term amidation
  MOD_RES (1)..(1): (Des-amino)His
  MISC_FEATURE (12)..(16): Lactam ring between side chains at positions 12 and 16
XSEGTFTSDYSKYLDEQAAKEFIAWLMNT

SEQ ID NO: 168 - protein, 29 aa, Artificial Sequence
  glucagon analog
  MISC_FEATURE: c-term amidation
  MOD_RES (1)..(1): (Des-amino)His
  MISC_FEATURE (16)..(20): Lactam ring between side chains at positions 16 and 20
XSEGTFTSDYSKYLDEQAAKEFIAWLMNT

SEQ ID NO: 169 - protein, 29 aa, Artificial Sequence
  glucagon analog
  MISC_FEATURE: c-term amidation
  MOD_RES (1)..(1): (Des-amino)His
XSEGTFTSDYSKYLDEQAAKEFIAWLVKG

SEQ ID NO: 170 - protein, 29 aa, Artificial Sequence
  glucagon analog
  MISC_FEATURE: c-term amidation
  MOD_RES (1)..(1): (Des-amino)His
  MISC_FEATURE (12)..(16): Lactam ring between side chains at positions 12 and 16
XSEGTFTSDYSKYLDEQAAKEFIAWLVKG

SEQ ID NO: 171 - protein, 29 aa, Artificial Sequence
  glucagon analog
  MISC_FEATURE: c-term amidation
  MOD_RES (1)..(1): (Des-amino)His
  MISC_FEATURE (16)..(20): Lactam ring between side chains at positions 16 and 20
XSEGTFTSDYSKYLDEQAAKEFIAWLVKG

SEQ ID NO: 172 - protein, 29 aa, Artificial Sequence
  glucagon analog
  MISC_FEATURE: c-term amidation
  MOD_RES (2)..(2): Aminoisobutyric acid
HXEGTFTSDYSKYLDERRAQDFVQWLMNT

SEQ ID NO: 173 - protein, 29 aa, Artificial Sequence
  glucagon analog
  MISC_FEATURE: c-term amidation
  MOD_RES (2)..(2): Aminoisobutyric acid
HXEGTFTSDYSKYLDERRAKDFVQWLMNT

SEQ ID NO: 174 - protein, 29 aa, Artificial Sequence
  glucagon analog
  MISC_FEATURE: c-term amidation
  MOD_RES (2)..(2): Aminoisobutyric acid
  MISC_FEATURE (16)..(20): Lactam ring between side chains at positions 16 and 20
HXEGTFTSDYSKYLDERRAKDFVQWLMNT

SEQ ID NO: 175 - protein, 29 aa, Artificial Sequence
  glucagon analog
  MISC_FEATURE: c-term amidation
  MOD_RES (2)..(2): Aminoisobutyric acid
  MISC_FEATURE (12)..(16): Lactam ring between side chains at positions 12 and 16
HXEGTFTSDYSKYLDERRAQDFVQWLMNT

SEQ ID NO: 176 - protein, 29 aa, Artificial Sequence
  glucagon analog
  MISC_FEATURE: c-term amidation
  MOD_RES (2)..(2): Aminoisobutyric acid
  MISC_FEATURE (12)..(16): Lactam ring between side chains at positions 12 and 16
HXEGTFTSDYSKYLDERRAKDFVQWLMNT

SEQ ID NO: 177 - protein, 29 aa, Artificial Sequence
  glucagon analog
  MISC_FEATURE: c-term amidation
  MOD_RES (2)..(2): Aminoisobutyric acid
  MISC_FEATURE (16)..(20): Lactam ring between side chains at positions 16 and 20
HXEGTFTSDYSKYLDKRRAEDFVQWLMNT

SEQ ID NO: 178 - protein, 29 aa, Artificial Sequence
  glucagon analog
  MISC_FEATURE: c-term amidation
  MOD_RES (2)..(2): Aminoisobutyric acid
HXEGTFTSDYSKYLDERAAKDFVQWLMNT

SEQ ID NO: 179 - protein, 29 aa, Artificial Sequence
  glucagon analog
  MISC_FEATURE: c-term amidation
  MOD_RES (2)..(2): Aminoisobutyric acid
  MISC_FEATURE (16)..(20): Lactam ring between side chains at positions 16 and 20
HXEGTFTSDYSKYLDERAAKDFVQWLMNT

SEQ ID NO: 180 - protein, 29 aa, Artificial Sequence
  glucagon analog
  MISC_FEATURE: c-term amidation
  MOD_RES (2)..(2): Aminoisobutyric acid
  MISC_FEATURE (12)..(16): Lactam ring between side chains at positions 12 and 16
HXEGTFTSDYSKYLDERAAQDFVQWLMNT

SEQ ID NO: 181 - protein, 29 aa, Artificial Sequence
  glucagon analog
  MISC_FEATURE: c-term amidation
  MOD_RES (2)..(2): Aminoisobutyric acid
  MISC_FEATURE (12)..(16): Lactam ring between side chains at positions 12 and 16
HXEGTFTSDYSKYLDERAAKDFVQWLMNT

SEQ ID NO: 182 - protein, 29 aa, Artificial Sequence
  glucagon analog
  MISC_FEATURE: c-term amidation
  MOD_RES (2)..(2): Aminoisobutyric acid
  MISC_FEATURE (16)..(20): Lactam ring between side chains at positions 16 and 20
HXEGTFTSDYSKYLDKRAAEDFVQWLMNT

SEQ ID NO: 183 - protein, 29 aa, Artificial Sequence
  glucagon analog
  MISC_FEATURE: c-term amidation
  MOD_RES (2)..(2): Aminoisobutyric acid
HXEGTFTSDYSKYLDEQAAKEFIAWLMNT

SEQ ID NO: 184 - protein, 29 aa, Artificial Sequence
  glucagon analog
  MISC_FEATURE: c-term amidation
  MOD_RES (2)..(2): Aminoisobutyric acid
  MISC_FEATURE (12)..(16): Lactam ring between side chains at positions 12 and 16
HXEGTFTSDYSKYLDEQAAKEFIAWLMNT

SEQ ID NO: 185 - protein, 29 aa, Artificial Sequence
  glucagon analog
  MISC_FEATURE: c-term amidation
  MOD_RES (2)..(2): Aminoisobutyric acid
  MISC_FEATURE (16)..(20): Lactam ring between side chains at positions 16 and 20
HXEGTFTSDYSKYLDEQAAKEFIAWLMNT

SEQ ID NO: 186 - protein, 29 aa, Artificial Sequence
  glucagon analog
  MISC_FEATURE: c-term amidation
  MOD_RES (2)..(2): Aminoisobutyric acid
HXEGTFTSDYSKYLDEQAAKEFIAWLVKG

SEQ ID NO: 187 - protein, 29 aa, Artificial Sequence
  glucagon analog
  MISC_FEATURE: c-term amidation
  MOD_RES (2)..(2): Aminoisobutyric acid
  MISC_FEATURE (12)..(16): Lactam ring between side chains at positions 12 and 16
HXEGTFTSDYSKYLDEQAAKEFIAWLVKG

SEQ ID NO: 188 - protein, 29 aa, Artificial Sequence
  glucagon analog
  MISC_FEATURE: c-term amidation
  MOD_RES (2)..(2): Aminoisobutyric acid
  MISC_FEATURE (16)..(20): Lactam ring between side chains at positions 16 and 20
HXEGTFTSDYSKYLDEQAAKEFIAWLVKG

SEQ ID NO: 189 - protein, 29 aa, Artificial Sequence
  glucagon analog
  MISC_FEATURE: c-term amidation
  MOD_RES (2)..(2): D-Ala
HXEGTFTSDYSKYLDERRAQDFVQWLMNT

SEQ ID NO: 190 - protein, 29 aa, Artificial Sequence
  glucagon analog
  MISC_FEATURE: c-term amidation
  MOD_RES (2)..(2): D-Ala
HXEGTFTSDYSKYLDERRAKDFVQWLMNT

SEQ ID NO: 191 - protein, 29 aa, Artificial Sequence
  glucagon analog
  MISC_FEATURE: c-term amidation
  MOD_RES (2)..(2): D-Ala
  MISC_FEATURE (16)..(20): Lactam ring between side chains at positions 16 and 20
HXEGTFTSDYSKYLDERRAKDFVQWLMNT

SEQ ID NO: 192 - protein, 29 aa, Artificial Sequence
  glucagon analog
  MISC_FEATURE: c-term amidation
  MOD_RES (2)..(2): D-Ala
  MISC_FEATURE (12)..(16): Lactam ring between side chains at positions 12 and 16
HXEGTFTSDYSKYLDERRAQDFVQWLMNT

SEQ ID NO: 193 - protein, 29 aa, Artificial Sequence
  glucagon analog
  MISC_FEATURE: c-term amidation
  MOD_RES (2)..(2): D-Ala
  MISC_FEATURE (12)..(16): Lactam ring between side chains at positions 12 and 16
HXEGTFTSDYSKYLDERRAKDFVQWLMNT

SEQ ID NO: 194 - protein, 29 aa, Artificial Sequence
  glucagon analog
  MISC_FEATURE: c-term amidation
  MOD_RES (2)..(2): D-Ala
  MISC_FEATURE (16)..(20): Lactam ring between side chains at positions 16 and 20
HXEGTFTSDYSKYLDKRRAEDFVQWLMNT

SEQ ID NO: 195 - protein, 29 aa, Artificial Sequence
  glucagon analog
  MISC_FEATURE: c-term amidation
  MOD_RES (2)..(2): D-Ala
  MISC_FEATURE (16)..(20): Lactam ring between side chains at positions 16 and 20
HXEGTFTSDYSKYLDERAAKDFVQWLMNT

SEQ ID NO: 196 - protein, 29 aa, Artificial Sequence
  glucagon analog
  MISC_FEATURE: c-term amidation
  MOD_RES (2)..(2): D-Ala
  MISC_FEATURE (16)..(20): Lactam ring between side chains at positions 16 and 20
HXEGTFTSDYSKYLDERAAKDFVQWLMNT

SEQ ID NO: 197 - protein, 29 aa, Artificial Sequence
  glucagon analog
  MISC_FEATURE: c-term amidation
  MOD_RES (2)..(2): D-Ala
  MISC_FEATURE (12)..(16): Lactam ring between side chains at positions 12 and 16
HXEGTFTSDYSKYLDERAAQDFVQWLMNT

SEQ ID NO: 198 - protein, 29 aa, Artificial Sequence
  glucagon analog
  MISC_FEATURE: c-term amidation
  MOD_RES (2)..(2): D-Ala
  MISC_FEATURE (12)..(16): Lactam ring between side chains at positions 12 and 16
HXEGTFTSDYSKYLDERAAKDFVQWLMNT

SEQ ID NO: 199 - protein, 29 aa, Artificial Sequence
  glucagon analog
  MISC_FEATURE: c-term amidation
  MOD_RES (2)..(2): D-Ala
  MISC_FEATURE (16)..(20): Lactam ring between side chains at positions 16 and 20
HXEGTFTSDYSKYLDKRAAEDFVQWLMNT

SEQ ID NO: 200 - protein, 29 aa, Artificial Sequence
  glucagon analog
  MISC_FEATURE: c-term amidation
  MOD_RES (2)..(2): D-Ala
HXEGTFTSDYSKYLDEQAAKEFIAWLMNT

SEQ ID NO: 201 - protein, 29 aa, Artificial Sequence
  glucagon analog
  MISC_FEATURE: c-term amidation
  MOD_RES (2)..(2): D-Ala
  MISC_FEATURE (12)..(16): Lactam ring between side chains at positions 12 and 16
HXEGTFTSDYSKYLDEQAAKEFIAWLMNT

SEQ ID NO: 202 - protein, 29 aa, Artificial Sequence
  glucagon analog
  MISC_FEATURE: c-term amidation
  MOD_RES (2)..(2): D-Ala
  MISC_FEATURE (16)..(20): Lactam ring between side chains at positions 16 and 20
HXEGTFTSDYSKYLDEQAAKEFIAWLMNT

SEQ ID NO: 203 - protein, 29 aa, Artificial Sequence
  glucagon analog
  MISC_FEATURE: c-term amidation
  MOD_RES (2)..(2): D-Ala
HXEGTFTSDYSKYLDEQAAKEFIAWLVKG

SEQ ID NO: 204 - protein, 29 aa, Artificial Sequence
  glucagon analog
  MISC_FEATURE: c-term amidation
  MOD_RES (2)..(2): D-Ala
  MISC_FEATURE (12)..(16): Lactam ring between side chains at positions 12 and 16
HXEGTFTSDYSKYLDEQAAKEFIAWLVKG

SEQ ID NO: 205 - protein, 29 aa, Artificial Sequence
  glucagon analog
  MISC_FEATURE: Lactam ring between side chains at positions 16 and 20
  MOD_RES (2)..(2): D-Ala
  MISC_FEATURE (16)..(20): c-term amidation
HXEGTFTSDYSKYLDEQAAKEFIAWLVKG

SEQ ID NO: 206 - protein, 29 aa, Artificial Sequence
  glucagon analog
  MISC_FEATURE: c-term amidation
  MOD_RES (24)..(24): Cys-PEG
HSQGTFTSDYSKYLDERRAQDFVCWLMNT

SEQ ID NO: 207 - protein, 29 aa, Artificial Sequence
  glucagon analog
  MISC_FEATURE: c-term amidation
  MOD_RES (24)..(24): Cys-PEG
HSQGTFTSDYSKYLDERRAKDFVCWLMNT

SEQ ID NO: 208 - protein, 29 aa, Artificial Sequence
  glucagon analog
  MISC_FEATURE: c-term amidation
  MISC_FEATURE (16)..(20): Lactam ring between side chains at positions 16 and 20
  MOD_RES (24)..(24): Cys-PEG
HSQGTFTSDYSKYLDERRAKDFVCWLMNT

SEQ ID NO: 209 - protein, 29 aa, Artificial Sequence
  glucagon analog
  MISC_FEATURE: c-term amidation
  MISC_FEATURE (12)..(16): Lactam ring between side chains at positions 12 and 16
  MOD_RES (24)..(24): Cys-PEG
HSQGTFTSDYSKYLDERRAQDFVCWLMNT

SEQ ID NO: 210 - protein, 29 aa, Artificial Sequence
  glucagon analog
  MISC_FEATURE: c-term amidation
  MISC_FEATURE (12)..(16): Lactam ring between side chains at positions 12 and 16
  MOD_RES (24)..(24): Cys-PEG
HSQGTFTSDYSKYLDERRAKDFVCWLMNT

SEQ ID NO: 211 - protein, 29 aa, Artificial Sequence
  glucagon analog
  MISC_FEATURE: c-term amidation
  MISC_FEATURE (16)..(20): Lactam ring between side chains at positions 16 and 20
  MOD_RES (24)..(24): Cys-PEG
HSQGTFTSDYSKYLDKRRAEDFVCWLMNT

SEQ ID NO: 212 - protein, 29 aa, Artificial Sequence
  glucagon analog
  MISC_FEATURE: c-term amidation
  MISC_FEATURE (16)..(20): Lactam ring between side chains at positions 16 and 20
  MOD_RES (24)..(24): Cys-PEG
HSQGTFTSDYSKYLDERAAKDFVCWLMNT

SEQ ID NO: 213 - protein, 29 aa, Artificial Sequence
  glucagon analog
  MISC_FEATURE: c-term amidation
  MISC_FEATURE (16)..(20): Lactam ring between side chains at positions 16 and 20
  MOD_RES (24)..(24): Cys-PEG
HSQGTFTSDYSKYLDERAAKDFVCWLMNT

SEQ ID NO: 214 - protein, 29 aa, Artificial Sequence
  glucagon analog
  MISC_FEATURE: c-term amidation
  MISC_FEATURE (12)..(16): Lactam ring between side chains at positions 12 and 16
  MOD_RES (24)..(24): Cys-PEG
HSQGTFTSDYSKYLDERAAQDFVCWLMNT

SEQ ID NO: 215 - protein, 29 aa, Artificial Sequence
  glucagon analog
  MISC_FEATURE: c-term amidation
  MISC_FEATURE (12)..(16): Lactam ring between side chains at positions 12 and 16
  MOD_RES (24)..(24): Cys-PEG
HSQGTFTSDYSKYLDERAAKDFVCWLMNT

SEQ ID NO: 216 - protein, 29 aa, Artificial Sequence
  glucagon analog
  MISC_FEATURE: c-term amidation
  MISC_FEATURE (16)..(20): Lactam ring between side chains at positions 16 and 20
  MOD_RES (24)..(24): Cys-PEG
HSQGTFTSDYSKYLDKRAAEDFVCWLMNT

SEQ ID NO: 217 - protein, 29 aa, Artificial Sequence
  glucagon analog
  MISC_FEATURE: c-term amidation
  MOD_RES (24)..(24): Cys-PEG
HSQGTFTSDYSKYLDEQAAKEFICWLMNT

SEQ ID NO: 218 - protein, 29 aa, Artificial Sequence
  glucagon analog
  MISC_FEATURE: c-term amidation
  MISC_FEATURE (12)..(16): Lactam ring between side chains at positions 12 and 16
  MOD_RES (24)..(24): Cys-PEG
HSQGTFTSDYSKYLDEQAAKEFICWLMNT

SEQ ID NO: 219 - protein, 29 aa, Artificial Sequence
  glucagon analog
  MISC_FEATURE: c-term amidation
  MISC_FEATURE (16)..(20): Lactam ring between side chains at positions 16 and 20
  MOD_RES (24)..(24): Cys-PEG
HSQGTFTSDYSKYLDEQAAKEFICWLMNT

SEQ ID NO: 220 - protein, 29 aa, Artificial Sequence
  glucagon analog
  MISC_FEATURE: c-term amidation
  MOD_RES (24)..(24): Cys-PEG
HSQGTFTSDYSKYLDEQAAKEFICWLVKG

SEQ ID NO: 221 - protein, 29 aa, Artificial Sequence
  glucagon analog
  MISC_FEATURE: c-term amidation
  MISC_FEATURE (12)..(16): Lactam ring between side chains at positions 12 and 16
  MOD_RES (24)..(24): Cys-PEG
HSQGTFTSDYSKYLDEQAAKEFICWLVKG

SEQ ID NO: 222 - protein, 29 aa, Artificial Sequence
  glucagon analog
  MISC_FEATURE: c-term amidation
  MISC_FEATURE (16)..(20): Lactam ring between side chains at positions 16 and 20
  MOD_RES (24)..(24): Cys-PEG
HSQGTFTSDYSKYLDEQAAKEFICWLVKG

SEQ ID NO: 223 - protein, 29 aa, Artificial Sequence
  glucagon analog
  MISC_FEATURE: c-term amidation
  MOD_RES (1)..(1): (Des-amino)His
  MOD_RES (24)..(24): Cys-PEG
XSQGTFTSDYSKYLDERRAQDFVCWLMNT

SEQ ID NO: 224 - protein, 29 aa, Artificial Sequence
  glucagon analog
  MISC_FEATURE: c-term amidation
  MOD_RES (1)..(1): (Des-amino)His
  MOD_RES (24)..(24): Cys-PEG
XSQGTFTSDYSKYLDERRAKDFVCWLMNT

SEQ ID NO: 225 - protein, 29 aa, Artificial Sequence
  glucagon analog
  MISC_FEATURE: c-term amidation
  MOD_RES (1)..(1): (Des-amino)His
  MISC_FEATURE (16)..(20): Lactam ring between side chains at positions 16 and 20
  MOD_RES (24)..(24): Cys-PEG
XSQGTFTSDYSKYLDERRAKDFVCWLMNT

SEQ ID NO: 226 - protein, 29 aa, Artificial Sequence
  glucagon analog
  MISC_FEATURE: c-term amidation
  MOD_RES (1)..(1): (Des-amino)His
  MISC_FEATURE (12)..(16): Lactam ring between side chains at positions 12 and 16
  MOD_RES (24)..(24): Cys-PEG
XSQGTFTSDYSKYLDERRAQDFVCWLMNT

SEQ ID NO: 227 - protein, 29 aa, Artificial Sequence
  glucagon analog
  MISC_FEATURE: c-term amidation
  MOD_RES (1)..(1): (Des-amino)His
  MISC_FEATURE (12)..(16): Lactam ring between side chains at positions 12 and 16
  MOD_RES (24)..(24): Cys-PEG
XSQGTFTSDYSKYLDERRAKDFVCWLMNT

SEQ ID NO: 228 - protein, 29 aa, Artificial Sequence
  glucagon analog
  MISC_FEATURE: c-term amidation
  MOD_RES (1)..(1): (Des-amino)His
  MISC_FEATURE (16)..(20): Lactam ring between side chains at positions 16 and 20
  MOD_RES (24)..(24): Cys-PEG
XSQGTFTSDYSKYLDKRRAEDFVCWLMNT

SEQ ID NO: 229 - protein, 29 aa, Artificial Sequence
  glucagon analog
  MISC_FEATURE: c-term amidation
  MOD_RES (1)..(1): (Des-amino)His
  MOD_RES (24)..(24): Cys-PEG
XSQGTFTSDYSKYLDERAAKDFVCWLMNT

SEQ ID NO: 230 - protein, 29 aa, Artificial Sequence
  glucagon analog
  MISC_FEATURE: c-term amidation
  MOD_RES (1)..(1): (Des-amino)His
  MISC_FEATURE (16)..(20): Lactam ring between side chains at positions 16 and 20
  MOD_RES (24)..(24): Cys-PEG
XSQGTFTSDYSKYLDERAAKDFVCWLMNT

SEQ ID NO: 231 - protein, 29 aa, Artificial Sequence
  glucagon analog
  MISC_FEATURE: c-term amidation; lactam ring between side chains at positions 12 and 16
  MOD_RES (1)..(1): (Des-amino)His
  MOD_RES (24)..(24): Cys-PEG
XSQGTFTSDYSKYLDERAAQDFVCWLMNT

SEQ ID NO: 232 - protein, 29 aa, Artificial Sequence
  glucagon analog
  MISC_FEATURE: c-term amidation
  MOD_RES (1)..(1): (Des-amino)His
  MISC_FEATURE (12)..(16): Lactam ring between side chains at positions 12 and 16
  MOD_RES (24)..(24): Cys-PEG
XSQGTFTSDYSKYLDERAAKDFVCWLMNT

SEQ ID NO: 233 - protein, 29 aa, Artificial Sequence
  glucagon analog
  MISC_FEATURE: c-term amidation
  MOD_RES (1)..(1): (Des-amino)His
  MISC_FEATURE (16)..(20): Lactam ring between side chains at positions 16 and 20
  MOD_RES (24)..(24): Cys-PEG
XSQGTFTSDYSKYLDKRAAEDFVCWLMNT

SEQ ID NO: 234 - protein, 29 aa, Artificial Sequence
  glucagon analog
  MISC_FEATURE: c-term amidation
  MOD_RES (1)..(1): (Des-amino)His
  MOD_RES (24)..(24): Cys-PEG
XSQGTFTSDYSKYLDEQAAKEFICWLMNT

SEQ ID NO: 235 - protein, 29 aa, Artificial Sequence
  glucagon analog
  MISC_FEATURE: c-term amidation
  MOD_RES (1)..(1): (Des-amino)His
  MISC_FEATURE (12)..(16): Lactam ring between side chains at positions 12 and 16
  MOD_RES (24)..(24): Cys-PEG
XSQGTFTSDYSKYLDEQAAKEFICWLMNT

SEQ ID NO: 236 - protein, 29 aa, Artificial Sequence
  glucagon analog
  MISC_FEATURE: c-term amidation
  MOD_RES (1)..(1): (Des-amino)His
  MISC_FEATURE (16)..(20): Lactam ring between side chains at positions 16 and 20
  MOD_RES (24)..(24): Cys-PEG
XSQGTFTSDYSKYLDEQAAKEFICWLMNT

SEQ ID NO: 237 - protein, 29 aa, Artificial Sequence
  glucagon analog
  MISC_FEATURE: c-term amidation
  MOD_RES (1)..(1): (Des-amino)His
  MOD_RES (24)..(24): Cys-PEG
XSQGTFTSDYSKYLDEQAAKEFICWLVKG

SEQ ID NO: 238 - protein, 29 aa, Artificial Sequence
  glucagon analog
  MISC_FEATURE: c-term amidation
  MOD_RES (1)..(1): (Des-amino)His
  MISC_FEATURE (12)..(16): Lactam ring between side chains at positions 12 and 16
  MOD_RES (24)..(24): Cys-PEG
XSQGTFTSDYSKYLDEQAAKEFICWLVKG

SEQ ID NO: 239 - protein, 29 aa, Artificial Sequence
  glucagon analog
  MISC_FEATURE: c-term amidation
  MOD_RES (1)..(1): (Des-amino)His
  MISC_FEATURE (16)..(20): Lactam ring between side chains at positions 16 and 20
  MOD_RES (24)..(24): Cys-PEG
XSQGTFTSDYSKYLDEQAAKEFICWLVKG

SEQ ID NO: 240 - protein, 29 aa, Artificial Sequence
  Synthetic peptide
  MISC_FEATURE: c-term amidation
  MOD_RES (2)..(2): Aminoisobutyric acid
  MOD_RES (24)..(24): Cys-PEG
HXQGTFTSDYSKYLDERRAQDFVCWLMNT

SEQ ID NO: 241 - protein, 29 aa, Artificial Sequence
  Synthetic peptide
  MISC_FEATURE: c-term amidation
  MOD_RES (2)..(2): Aminoisobutyric acid
  MOD_RES (24)..(24): Cys-PEG
HXQGTFTSDYSKYLDERRAKDFVCWLMNT

SEQ ID NO: 242 - protein, 29 aa, Artificial Sequence
  Synthetic peptide
  MISC_FEATURE: c-term amidation
  MOD_RES (2)..(2): Aminoisobutyric acid
  MISC_FEATURE (16)..(20): Lactam ring between side chains at positions 16 and 20
  MOD_RES (24)..(24): Cys-PEG
HXQGTFTSDYSKYLDERRAKDFVCWLMNT

SEQ ID NO: 243 - protein, 29 aa, Artificial Sequence
  Synthetic peptide
  MISC_FEATURE: c-term amidation
  MOD_RES (2)..(2): Aminoisobutyric acid
  MISC_FEATURE (12)..(16): Lactam ring between side chains at positions 12 and 16
  MOD_RES (24)..(24): Cys-PEG
HXQGTFTSDYSKYLDERRAQDFVCWLMNT

SEQ ID NO: 244 - protein, 29 aa, Artificial Sequence
  Synthetic peptide
  MISC_FEATURE: c-term amidation
  MOD_RES (2)..(2): Aminoisobutyric acid
  MISC_FEATURE (12)..(16): Lactam ring between side chains at positions 12 and 16
  MOD_RES (24)..(24): Cys-PEG
HXQGTFTSDYSKYLDERRAKDFVCWLMNT

SEQ ID NO: 245 - protein, 29 aa, Artificial Sequence
  Synthetic peptide
  MISC_FEATURE: c-term amidation
  MOD_RES (2)..(2): Aminoisobutyric acid
  MISC_FEATURE (16)..(20): Lactam ring side chains at positions 16 and 20
  MOD_RES (24)..(24): Cys-PEG
HXQGTFTSDYSKYLDKRRAEDFVCWLMNT

SEQ ID NO: 246 - protein, 29 aa, Artificial Sequence
  Synthetic peptide
  MISC_FEATURE: c-term amidation
  MOD_RES (2)..(2): Aminoisobutyric acid
  MOD_RES (24)..(24): Cys-PEG
HXQGTFTSDYSKYLDERAAKDFVCWLMNT

SEQ ID NO: 247 - protein, 29 aa, Artificial Sequence
  Synthetic peptide
  MISC_FEATURE: c-term amidation
  MOD_RES (2)..(2): Aminoisobutyric acid
  MISC_FEATURE (16)..(20): Lactam ring between side chains at positions 16 and 20
  MOD_RES (24)..(24): Cys-PEG
HXQGTFTSDYSKYLDERAAKDFVCWLMNT

SEQ ID NO: 248 - protein, 29 aa, Artificial Sequence
  Synthetic peptide
  MISC_FEATURE: c-term amidation
  MOD_RES (2)..(2): Aminoisobutyric acid
  MISC_FEATURE (12)..(16): Lactam ring between side chains at positions 12 and 16
  MOD_RES (24)..(24): Cys-PEG
HXQGTFTSDYSKYLDERAAQDFVCWLMNT

SEQ ID NO: 249 - protein, 29 aa, Artificial Sequence
  Synthetic peptide
  MISC_FEATURE: c-term amidation
  MOD_RES (2)..(2): Aminoisobutyric acid
  MISC_FEATURE (12)..(16): Lactam ring between side chains at positions 12 and 16
  MOD_RES (24)..(24): Cys-PEG
HXQGTFTSDYSKYLDERAAKDFVCWLMNT

SEQ ID NO: 250 - protein, 29 aa, Artificial Sequence
  Synthetic peptide
  MISC_FEATURE: c-term amidation
  MOD_RES (2)..(2): Aminoisobutyric acid
  MISC_FEATURE (12)..(16): Lactam ring between side chains at positions 12 and 16
  MOD_RES (24)..(24): Cys-PEG
HXQGTFTSDYSKYLDKRAAEDFVCWLMNT

SEQ ID NO: 251 - protein, 29 aa, Artificial Sequence
  Synthetic peptide
  MISC_FEATURE: c-term amidation
  MOD_RES (2)..(2): Aminoisobutyric acid
  MOD_RES (24)..(24): Cys-PEG
HXQGTFTSDYSKYLDEQAAKEFICWLMNT

SEQ ID NO: 252 - protein, 29 aa, Artificial Sequence
  Synthetic peptide
  misc_feature (2)..(2): Xaa can be any naturally occurring amino acid
HXQGTFTSDYSKYLDEQAAKEFICWLMNT

SEQ ID NO: 253 - protein, 29 aa, Artificial Sequence
  Synthetic peptide
  MISC_FEATURE: c-term amidation
  MOD_RES (2)..(2): Aminoisobutyric acid
  MISC_FEATURE (16)..(20): Lactam ring between side chains at positions 16 and 20
  MOD_RES (24)..(24): Cys-PEG
HXQGTFTSDYSKYLDEQAAKEFICWLMNT

SEQ ID NO: 254 - protein, 29 aa, Artificial Sequence
  Synthetic peptide
  MISC_FEATURE: c-term amidation
  MOD_RES (2)..(2): Aminoisobutyric acid
  MOD_RES (24)..(24): Cys-PEG
HXQGTFTSDYSKYLDEQAAKEFICWLVKG

SEQ ID NO: 255 - protein, 29 aa, Artificial Sequence
  Synthetic peptide
  MISC_FEATURE: c-term amidation
  MOD_RES (2)..(2): Aminoisobutyric acid
  MISC_FEATURE (12)..(16): Lactam ring between side chains at positions 12 and 16
  MOD_RES (24)..(24): Cys-PEG
HXQGTFTSDYSKYLDEQAAKEFICWLVKG

SEQ ID NO: 256 - protein, 29 aa, Artificial Sequence
  Synthetic peptide
  MISC_FEATURE: c-term amidation
  MOD_RES (2)..(2): Aminoisobutyric acid
  MISC_FEATURE (16)..(20): Lactam ring between side chains at positions 16 and 20
  MOD_RES (24)..(24): Cys-PEG
HXQGTFTSDYSKYLDEQAAKEFICWLVKG

SEQ ID NO: 257 - protein, 29 aa, Artificial Sequence
  Synthetic peptide
  MISC_FEATURE: c-term amidation
  MOD_RES (2)..(2): D-Ala
  MOD_RES (24)..(24): Cys-PEG
HXQGTFTSDYSKYLDERRAQDFVCWLMNT

SEQ ID NO: 258 - protein, 29 aa, Artificial Sequence
  Synthetic peptide
  MISC_FEATURE: c-term amidation
  MOD_RES (2)..(2): D-Ala
  MOD_RES (24)..(24): Cys-PEG
HXQGTFTSDYSKYLDERRAKDFVCWLMNT

SEQ ID NO: 259 - protein, 29 aa, Artificial Sequence
  Synthetic peptide
  MISC_FEATURE: c-term amidation
  MOD_RES (2)..(2): D-Ala
  MISC_FEATURE (16)..(20): Lactam ring between side chains at positions 16 and 20
  MOD_RES (24)..(24): Cys-PEG
HXQGTFTSDYSKYLDERRAKDFVCWLMNT

SEQ ID NO: 260 - protein, 29 aa, Artificial Sequence
  Synthetic peptide
  MISC_FEATURE: c-term amidation
  MOD_RES (2)..(2): D-Ala
  MISC_FEATURE (12)..(16): Lactam ring between side chrains at positions 12 and 16
  MOD_RES (24)..(24): Cys-PEG
HXQGTFTSDYSKYLDERRAQDFVCWLMNT

SEQ ID NO: 261 - protein, 29 aa, Artificial Sequence
  Synthetic peptide
  MISC_FEATURE: c-term amidation; lactam ring between side chains at positions 12 and 16
  MOD_RES (2)..(2): D-Ala
  MOD_RES (24)..(24): Cys-PEG
HXQGTFTSDYSKYLDERRAKDFVCWLMNT

SEQ ID NO: 262 - protein, 29 aa, Artificial Sequence
  Synthetic peptide
  MISC_FEATURE: c-term amidation
  MOD_RES (2)..(2): D-Ala
  MISC_FEATURE (16)..(20): Lactam ring between side chains at positions 16 and 20
  MOD_RES (24)..(24): Cys-PEG
HXQGTFTSDYSKYLDKRRAEDFVCWLMNT

SEQ ID NO: 263 - protein, 29 aa, Artificial Sequence
  Synthetic peptide
  MISC_FEATURE: c-term amidation
  MOD_RES (2)..(2): D-Ala
  MOD_RES (24)..(24): Cys-PEG
HXQGTFTSDYSKYLDERAAKDFVCWLMNT

SEQ ID NO: 264 - protein, 29 aa, Artificial Sequence
  Synthetic peptide
  MISC_FEATURE: c-term amidation
  MOD_RES (2)..(2): D-Ala
  MISC_FEATURE (16)..(20): Lactam ring between side chains at positions 16 and 20
  MOD_RES (24)..(24): Cys-PEG
HXQGTFTSDYSKYLDERAAKDFVCWLMNT

SEQ ID NO: 265 - protein, 29 aa, Artificial Sequence
  Synthetic peptide
  MISC_FEATURE: c-term amidation
  MOD_RES (2)..(2): D-Ala
  MISC_FEATURE (12)..(16): Lactam ring between side chains at positions 12 and 16
  MOD_RES (24)..(24): Cys-PEG
HXQGTFTSDYSKYLDERAAQDFVCWLMNT

SEQ ID NO: 266 - protein, 29 aa, Artificial Sequence
  Synthetic peptide
  MISC_FEATURE: c-term amidation
  MOD_RES (2)..(2): D-Ala
  MISC_FEATURE (12)..(16): Lactam ring betwee side chains at positions 12 and 16
  MOD_RES (24)..(24): Cys-PEG
HXQGTFTSDYSKYLDERAAKDFVCWLMNT

SEQ ID NO: 267 - protein, 29 aa, Artificial Sequence
  Synthetic peptide
  MISC_FEATURE: c-term amidation
  MOD_RES (2)..(2): D-Ala
  MISC_FEATURE (16)..(20): Lactam ring between side chains at positions 16 and 20
  MOD_RES (24)..(24): Cys-PEG
HXQGTFTSDYSKYLDKRAAEDFVCWLMNT

SEQ ID NO: 268 - protein, 29 aa, Artificial Sequence
  Synthetic peptide
  MISC_FEATURE: c-term amidation
  MOD_RES (2)..(2): D-Ala
  MOD_RES (24)..(24): Cys-PEG
HXQGTFTSDYSKYLDEQAAKEFICWLMNT

SEQ ID NO: 269 - protein, 29 aa, Artificial Sequence
  Synthetic peptide
  MISC_FEATURE: c-term amidation
  MOD_RES (2)..(2): D-Ala
  MISC_FEATURE (12)..(16): Lactam ring betwee side chains at positions 12 and 16
  MOD_RES (24)..(24): Cys-PEG
HXQGTFTSDYSKYLDEQAAKEFICWLMNT

SEQ ID NO: 270 - protein, 29 aa, Artificial Sequence
  Synthetic peptide
  MISC_FEATURE: c-term amidation
  MOD_RES (2)..(2): D-Ala
  MISC_FEATURE (16)..(20): Lactam ring betwee side chains at positions 16 and 20
  MOD_RES (24)..(24): Cys-PEG
HXQGTFTSDYSKYLDEQAAKEFICWLMNT

SEQ ID NO: 271 - protein, 29 aa, Artificial Sequence
  Synthetic peptide
  MISC_FEATURE: c-term amidation
  MOD_RES (2)..(2): D-Ala
  MOD_RES (24)..(24): Cys-PEG
HXQGTFTSDYSKYLDEQAAKEFICWLVKG

SEQ ID NO: 272 - protein, 29 aa, Artificial Sequence
  Synthetic peptide
  MISC_FEATURE: c-term amidation
  MOD_RES (2)..(2): D-Ala
  MISC_FEATURE (12)..(16): Lactam ring between side chains at positions 12 and 16
  MOD_RES (24)..(24): Cys-PEG
HXQGTFTSDYSKYLDEQAAKEFICWLVKG

SEQ ID NO: 273 - protein, 29 aa, Artificial Sequence
  Synthetic peptide
  MISC_FEATURE: c-term amidation
  MOD_RES (2)..(2): D-Ala
  MISC_FEATURE (16)..(20): Lactam ring between side chains at positions 16 and 20
  MOD_RES (24)..(24): Cys-PEG
HXQGTFTSDYSKYLDEQAAKEFICWLVKG

SEQ ID NO: 274 - protein, 29 aa, Artificial Sequence
  Synthetic peptide
  MISC_FEATURE: c-term amidation
  MOD_RES (24)..(24): Cys-PEG
HSEGTFTSDYSKYLDERRAQDFVCWLMNT

SEQ ID NO: 275 - protein, 29 aa, Artificial Sequence
  Synthetic peptide
  MISC_FEATURE: c-term amidation
  MOD_RES (24)..(24): Cys-PEG
HSEGTFTSDYSKYLDERRAKDFVCWLMNT

SEQ ID NO: 276 - protein, 29 aa, Artificial Sequence
  Synthetic peptide
  MISC_FEATURE: c-term amidation
  MISC_FEATURE (16)..(20): Lactam ring between side chains at positions 16 and 20
  MOD_RES (24)..(24): Cys-PEG
HSEGTFTSDYSKYLDERRAKDFVCWLMNT

SEQ ID NO: 277 - protein, 29 aa, Artificial Sequence
  Synthetic peptide
  MISC_FEATURE: c-term amidation
  MISC_FEATURE (12)..(16): Lactam ring between side chains at positions 12 and 16
  MOD_RES (24)..(24): Cys-PEG
HSEGTFTSDYSKYLDERRAQDFVCWLMNT

SEQ ID NO: 278 - protein, 29 aa, Artificial Sequence
  Synthetic peptide
  MISC_FEATURE: c-term amidation
  MISC_FEATURE (12)..(16): Lactam ring between side chains at positions 12 and 16
  MOD_RES (24)..(24): Cys-PEG
HSEGTFTSDYSKYLDERRAKDFVCWLMNT

SEQ ID NO: 279 - protein, 29 aa, Artificial Sequence
  Synthetic peptide
  MISC_FEATURE: c-term amidation
  MISC_FEATURE (16)..(20): Lactam ring between side chains at positions 16 and 20
  MOD_RES (24)..(24): Cys-PEG
HSEGTFTSDYSKYLDKRRAEDFVCWLMNT

SEQ ID NO: 280 - protein, 29 aa, Artificial Sequence
  Synthetic peptide
  MISC_FEATURE: c-term amidation
  MOD_RES (24)..(24): Cys-PEG
HSEGTFTSDYSKYLDERAAKDFVCWLMNT

SEQ ID NO: 281 - protein, 29 aa, Artificial Sequence
  Synthetic peptide
  MISC_FEATURE: c-term amidation
  MISC_FEATURE (16)..(20): Lactam ring between side chains at positions 16 and 20
  MOD_RES (24)..(24): Cys-PEG
HSEGTFTSDYSKYLDERAAKDFVCWLMNT

SEQ ID NO: 282 - protein, 29 aa, Artificial Sequence
  Synthetic peptide
  MISC_FEATURE: c-term amidation
  MISC_FEATURE (12)..(16): Lactam ring between side chains at positions 12 and 16
  MOD_RES (24)..(24): Cys-PEG
HSEGTFTSDYSKYLDERAAQDFVCWLMNT

SEQ ID NO: 283 - protein, 29 aa, Artificial Sequence
  Synthetic peptide
  MISC_FEATURE: c-term amidation
  MISC_FEATURE (12)..(16): Lactam ring between side chains at positions 12 and 16
  MOD_RES (24)..(24): Cys-PEG
HSEGTFTSDYSKYLDERAAKDFVCWLMNT

SEQ ID NO: 284 - protein, 29 aa, Artificial Sequence
  Synthetic peptide
  MISC_FEATURE: c-term amidation
  MISC_FEATURE (16)..(20): Lactam ring between side chains at positions 16 and 20
  MOD_RES (24)..(24): Cys-PEG
HSEGTFTSDYSKYLDKRAAEDFVCWLMNT

SEQ ID NO: 285 - protein, 29 aa, Artificial Sequence
  Synthetic peptide
  MISC_FEATURE: c-term amidation
  MOD_RES (24)..(24): Cys-PEG
HSEGTFTSDYSKYLDEQAAKEFICWLMNT

SEQ ID NO: 286 - protein, 29 aa, Artificial Sequence
  Synthetic peptide
  MISC_FEATURE: c-term amidation
  MISC_FEATURE (12)..(16): Lactam ring between side chains at positions 12 and 16
  MOD_RES (24)..(24): Cys-PEG
HSEGTFTSDYSKYLDEQAAKEFICWLMNT

SEQ ID NO: 287 - protein, 29 aa, Artificial Sequence
  Synthetic peptide
  MISC_FEATURE: c-term amidation
  MISC_FEATURE (16)..(20): Lactam ring between side chain at positions 16 and 20
  MOD_RES (24)..(24): Cys-PEG
HSEGTFTSDYSKYLDEQAAKEFICWLMNT

SEQ ID NO: 288 - protein, 29 aa, Artificial Sequence
  Synthetic peptide
  MISC_FEATURE: c-term amidation
  MOD_RES (24)..(24): Cys-PEG
HSEGTFTSDYSKYLDEQAAKEFICWLVKG

SEQ ID NO: 289 - protein, 29 aa, Artificial Sequence
  Synthetic peptide
  MISC_FEATURE: c-term amidation
  MISC_FEATURE (12)..(16): Lactam ring between side chains at positions 12 and 16
  MOD_RES (24)..(24): Cys-PEG
HSEGTFTSDYSKYLDEQAAKEFICWLVKG

SEQ ID NO: 290 - protein, 29 aa, Artificial Sequence
  Synthetic peptide
  MISC_FEATURE: c-term amidation
  MISC_FEATURE (16)..(20): Lactam ring between side chains at positions 16 and 20
  MOD_RES (24)..(24): Cys-PEG
HSEGTFTSDYSKYLDEQAAKEFICWLVKG

SEQ ID NO: 291 - protein, 29 aa, Artificial Sequence
  Synthetic peptide
  MISC_FEATURE: c-term amidation
  MOD_RES (1)..(1): (Des-amino)His
  MOD_RES (24)..(24): Cys-PEG
XSEGTFTSDYSKYLDERRAQDFVCWLMNT

SEQ ID NO: 292 - protein, 29 aa, Artificial Sequence
  Synthetic peptide
  MISC_FEATURE: c-term amidation
  MOD_RES (1)..(1): (Des-amino)His
  MOD_RES (24)..(24): Cys-PEG
XSEGTFTSDYSKYLDERRAKDFVCWLMNT

SEQ ID NO: 293 - protein, 29 aa, Artificial Sequence
  Synthetic peptide
  MISC_FEATURE: c-term amidation
  MOD_RES (1)..(1): (Des-amino)His
  MISC_FEATURE (16)..(20): Lactam ring between side chains at positions 16 and 20
  MOD_RES (24)..(24): Cys-PEG
XSEGTFTSDYSKYLDERRAKDFVCWLMNT

SEQ ID NO: 294 - protein, 29 aa, Artificial Sequence
  Synthetic peptide
  MISC_FEATURE: c-term amidation
  MOD_RES (1)..(1): (Des-amino)His
  MISC_FEATURE (12)..(16): Lactam ring between side chains at positions 12 and 16
  MOD_RES (24)..(24): Cys-PEG
XSEGTFTSDYSKYLDERRAQDFVCWLMNT

SEQ ID NO: 295 - protein, 29 aa, Artificial Sequence
  Synthetic peptide
  MISC_FEATURE: c-term amidation
  MOD_RES (1)..(1): (Des-amino)His
  MISC_FEATURE (12)..(16): Lactam ring between side chains at positions 12 and 16
  MOD_RES (24)..(24): Cys-PEG
XSEGTFTSDYSKYLDERRAKDFVCWLMNT

SEQ ID NO: 296 - protein, 29 aa, Artificial Sequence
  Synthetic peptide
  MISC_FEATURE: c-term amidation
  MOD_RES (1)..(1): (Des-amino)His
  MISC_FEATURE (16)..(20): Lactam ring between side chains at positions 16 and 20
  MOD_RES (24)..(24): Cys-PEG
XSEGTFTSDYSKYLDKRRAEDFVCWLMNT

SEQ ID NO: 297 - protein, 29 aa, Artificial Sequence
  Synthetic peptide
  MISC_FEATURE: c-term amidation
  MOD_RES (1)..(1): (Des-amino)His
  MOD_RES (24)..(24): Cys-PEG
XSEGTFTSDYSKYLDERAAKDFVCWLMNT

SEQ ID NO: 298 - protein, 29 aa, Artificial Sequence
  Synthetic peptide
  MISC_FEATURE: c-term amidation
  MOD_RES (1)..(1): (Des-amino)His
  MISC_FEATURE (16)..(20): Lactam ring between side chains at positions 16 and 20
  MOD_RES (24)..(24): Cys-PEG
XSEGTFTSDYSKYLDERAAKDFVCWLMNT

SEQ ID NO: 299 - protein, 29 aa, Artificial Sequence
  Synthetic peptide
  MISC_FEATURE: c-term amidation
  MOD_RES (1)..(1): (Des-amino)His
  MISC_FEATURE (12)..(16): Lactam ring between side chains at positions 12 and 16
  MOD_RES (24)..(24): Cys-PEG
XSEGTFTSDYSKYLDERAAQDFVCWLMNT

SEQ ID NO: 300 - protein, 29 aa, Artificial Sequence
  Synthetic peptide
  MISC_FEATURE: c-term amidation
  MOD_RES (1)..(1): (Des-amino)His
  MISC_FEATURE (12)..(16): Lactam ring between side chains at positions 12 and 16
  MOD_RES (24)..(24): Cys-PEG
XSEGTFTSDYSKYLDERAAKDFVCWLMNT

SEQ ID NO: 301 - protein, 29 aa, Artificial Sequence
  Synthetic peptide
  MISC_FEATURE: c-term amidation
  MOD_RES (1)..(1): (Des-amino)His
  MISC_FEATURE (16)..(20): Lactam ring between side chains at positions 16 and 20
  MOD_RES (24)..(24): Cys-PEG
XSEGTFTSDYSKYLDKRAAEDFVCWLMNT

SEQ ID NO: 302 - protein, 29 aa, Artificial Sequencce
  Synthetic peptide
  MISC_FEATURE: c-term amidation
  MOD_RES (1)..(1): (Des-amino)His
  MOD_RES (24)..(24): Cys-PEG
XSEGTFTSDYSKYLDEQAAKGFICWLMNT

SEQ ID NO: 303 - protein, 29 aa, Artificial Sequence
  Synthetic peptide
  MISC_FEATURE: c-term amidation
  MOD_RES (1)..(1): (Des-amino)His
  MISC_FEATURE (12)..(16): Lactam ring between side chains at positions 12 and 16
  MOD_RES (24)..(24): Cys-PEG
XSEGTFTSDYSKYLDEQAAKGFICWLMNT

SEQ ID NO: 304 - protein, 29 aa, Artificial Sequence
  Synthetic peptide
  MISC_FEATURE: c-term amidation
  MOD_RES (1)..(1): (Des-amino)His
  MISC_FEATURE (16)..(20): Lactam ring between side chains at positions 16 and 20
  MOD_RES (24)..(24): Cys-PEG
XSEGTFTSDYSKYLDEQAAKGFICWLMNT

SEQ ID NO: 305 - protein, 29 aa, Artificial Sequencce
  Synthetic peptide
  MISC_FEATURE: c-term amidation
  MOD_RES (1)..(1): (des-amino)His
  MOD_RES (24)..(24): Cys-PEG
XSEGTFTSDYSKYLDEQAAKGFICWLVKG

SEQ ID NO: 306 - protein, 29 aa, Artificial Sequence
  Synthetic peptide
  MISC_FEATURE: c-term amidation
  MOD_RES (1)..(1): (Des-amino)His
  MISC_FEATURE (12)..(16): Lactam ring between side chains at positions 12 and 16
  MOD_RES (24)..(24): Cys-PEG
XSEGTFTSDYSKYLDEQAAKGFICWLVKG

SEQ ID NO: 307 - protein, 29 aa, Artificial Sequence
  Synthetic peptide
  MISC_FEATURE: c-term amidation
  MOD_RES (1)..(1): (Des-amino)His
  MISC_FEATURE (16)..(20): Lactam ring between side chains at positions 16 and 20
  MOD_RES (24)..(24): Cys-PEG
XSEGTFTSDYSKYLDEQAAKGFICWLVKG

SEQ ID NO: 308 - protein, 29 aa, Artificial Sequence
  Synthetic peptide
  MISC_FEATURE: c-term amidation
  MOD_RES (2)..(2): Aminoisobutyric acid
  MOD_RES (24)..(24): Cys-PEG
HXEGTFTSDYSKYLDERRAQDFVCWLMNT

SEQ ID NO: 309 - protein, 29 aa, Artificial Sequence
  Synthetic peptide
  MISC_FEATURE: c-term amidation
  MOD_RES (2)..(2): Aminoisobutyric acid
  MOD_RES (24)..(24): Cys-PEG
HXEGTFTSDYSKYLDERRAKDFVCWLMNT

SEQ ID NO: 310 - protein, 29 aa, Artificial Sequence
  Synthetic peptide
  MISC_FEATURE: c-term amidation
  MOD_RES (2)..(2): Aminoisobutyric acid
  MISC_FEATURE (16)..(20): Lactam ring between side chains at positions 16 and 20
  MOD_RES (24)..(24): Cys-PEG
HXEGTFTSDYSKYLDERRAKDFVCWLMNT

SEQ ID NO: 311 - protein, 29 aa, Artificial Sequence
  Synthetic peptide
  MISC_FEATURE: c-term amidation
  MOD_RES (2)..(2): Aminoisobutyric acid
  MISC_FEATURE (12)..(16): Lactam ring between side chain at positions 12 and 16
  MOD_RES (24)..(24): Cys-PEG
HXEGTFTSDYSKYLDERRAQDFVCWLMNT

SEQ ID NO: 312 - protein, 29 aa, Artificial Sequence
  Synthetic peptide
  MISC_FEATURE: c-term amidation
  MOD_RES (2)..(2): Aminoisobutyric acid
  MISC_FEATURE (12)..(16): Lactam ring between side chains at positions 12 and 16
  MOD_RES (24)..(24): Cys-PEG
HXEGTFTSDYSKYLDERRAKDFVCWLMNT

SEQ ID NO: 313 - protein, 29 aa, Artificial Sequence
  Synthetic peptide
  MISC_FEATURE: c-term amidation
  MOD_RES (2)..(2): Aminoisobutyric acid
  MISC_FEATURE (16)..(20): Lactam ring between side chains at positions 16 and 20
  MOD_RES (24)..(24): Cys-PEG
HXEGTFTSDYSKYLDKRRAEDFVCWLMNT

SEQ ID NO: 314 - protein, 29 aa, Artificial Sequence
  Synthetic peptide
  MISC_FEATURE: c-term amidation
  MOD_RES (2)..(2): Aminoisobutyric acid
  MOD_RES (24)..(24): Cys-PEG
HXEGTFTSDYSKYLDERAAKDFVCWLMNT

SEQ ID NO: 315 - protein, 29 aa, Artificial Sequence
  Synthetic peptide
  MISC_FEATURE: c-term amidation
  MOD_RES (2)..(2): Aminoisobutyric acid
  MISC_FEATURE (16)..(20): Lactam ring between seide chains at positions 16 and 20
  MOD_RES (24)..(24): Cys-PEG
HXEGTFTSDYSKYLDERAAKDFVCWLMNT

SEQ ID NO: 316 - protein, 29 aa, Artificial Sequence
  Synthetic peptide
  MISC_FEATURE: c-term amidation
  MOD_RES (2)..(2): Aminoisobutyric acid
  MISC_FEATURE (12)..(16): Lactam ring between side chains at positions 12 and 16
  MOD_RES (24)..(24): Cys-PEG
HXEGTFTSDYSKYLDERAAQDFVCWLMNT

SEQ ID NO: 317 - protein, 29 aa, Artificial Sequence
  Synthetic peptide
  MISC_FEATURE: c-term amidation
  MOD_RES (2)..(2): Aminoisobutyric acid
  MISC_FEATURE (12)..(16): Lactam ring between side chains at positions 12 adn 16
  MOD_RES (24)..(24): Cys-PEG
HXEGTFTSDYSKYLDERAAKDFVCWLMNT

SEQ ID NO: 318 - protein, 29 aa, Artificial Sequence
  Synthetic peptide
  MISC_FEATURE: c-term amidation
  MOD_RES (2)..(2): Aminoisobutyric acid
  MISC_FEATURE (16)..(20): Lactam ring between side chains at positions 16 and 20
  MOD_RES (24)..(24): Cys-PEG
HXEGTFTSDYSKYLDKRAAEDFVCWLMNT

SEQ ID NO: 319 - protein, 29 aa, Artificial Sequence
  Synthetic peptide
  MISC_FEATURE: c-term amidation
  MOD_RES (2)..(2): Aminoisobutyric acid
  MOD_RES (24)..(24): Cys-PEG
HXEGTFTSDYSKYLDEQAAKEFICWLMNT

SEQ ID NO: 320 - protein, 29 aa, Artificial Sequence
  Synthetic peptide
  MISC_FEATURE: c-term amidation
  MOD_RES (2)..(2): Aminoisobutyric acid
  MISC_FEATURE (12)..(16): Lactam ring between side chains at positions 12 and 16
  MOD_RES (24)..(24): Cys-PEG
HXEGTFTSDYSKYLDEQAAKEFICWLMNT

SEQ ID NO: 321 - protein, 29 aa, Artificial Sequence
  Synthetic peptide
  MISC_FEATURE: c-term amidation
  MOD_RES (2)..(2): Aminoisobutyric acid
  MISC_FEATURE (16)..(20): Lactam ring between side chains at position 16 and 20
  MOD_RES (24)..(24): Cys-PEG
HXEGTFTSDYSKYLDEQAAKEFICWLMNT

SEQ ID NO: 322 - protein, 29 aa, Artificial Sequence
  Synthetic peptide
  MISC_FEATURE: c-term amidation
  MOD_RES (2)..(2): Aminoisobutyric acid
  MOD_RES (24)..(24): Cys-PEG
HXEGTFTSDYSKYLDEQAAKEFICWLVKG

SEQ ID NO: 323 - protein, 29 aa, Artificial Sequence
  Synthetic peptide
  MISC_FEATURE: c-term amidation
  MOD_RES (2)..(2): Aminoisobutyric acid
  MISC_FEATURE (12)..(16): Lactam ring between side chains at positions 12 and 16
  MOD_RES (24)..(24): Cys-PEG
HXEGTFTSDYSKYLDEQAAKEFICWLVKG

SEQ ID NO: 324 - protein, 29 aa, Artificial Sequence
  Synthetic peptide
  MISC_FEATURE: c-term amidation
  MOD_RES (2)..(2): Aminoisobutyric acid
  MISC_FEATURE (16)..(20): Lactam ring between side chains at position 16 and 20
  MOD_RES (24)..(24): Cys-PEG
HXEGTFTSDYSKYLDEQAAKEFICWLVKG

SEQ ID NO: 325 - protein, 29 aa, Artificial Sequence
  Synthetic peptide
  MISC_FEATURE: c-term amidation
  MOD_RES (2)..(2): D-Ala
  MOD_RES (24)..(24): Cys-PEG
HXEGTFTSDYSKYLDERRAQDFVCWLMNT

SEQ ID NO: 326 - protein, 29 aa, Artificial Sequence
  Synthetic peptide
  MISC_FEATURE: c-term amidation
  MOD_RES (2)..(2): D-Ala
  MOD_RES (24)..(24): Cys-PEG
HXEGTFTSDYSKYLDERRAKDFVCWLMNT

SEQ ID NO: 327 - protein, 29 aa, Artificial Sequence
  Synthetic peptide
  MISC_FEATURE: c-term amidation
  MOD_RES (2)..(2): D-Ala
  MISC_FEATURE (16)..(20): Lactam ring between side chains at positions 16 and 20
  MOD_RES (24)..(24): Cys-PEG
HXEGTFTSDYSKYLDERRAKDFVCWLMNT

SEQ ID NO: 328 - protein, 29 aa, Artificial Sequence
  Synthetic peptide
  MISC_FEATURE: c-term amidation
  MOD_RES (2)..(2): D-Ala
  MISC_FEATURE (12)..(16): Lactam between side chains at positions 12 and 16
  MOD_RES (24)..(24): Cys-PEG
HXEGTFTSDYSKYLDERRAQDFVCWLMNT

SEQ ID NO: 329 - protein, 29 aa, Artificial Sequence
  Synthetic peptide
  MISC_FEATURE: c-term amidation
  MOD_RES (2)..(2): D-Ala
  MISC_FEATURE (12)..(16): Lactam ring between side chains at positions 12 and 16
  MOD_RES (24)..(24): Cys-PEG
HXEGTFTSDYSKYLDERRAKDFVCWLMNT

SEQ ID NO: 330 - protein, 29 aa, Artificial Sequence
  Synthetic peptide
  MISC_FEATURE: c-term amidation
  MOD_RES (2)..(2): D-Ala
  MISC_FEATURE (16)..(20): Lactam ring between side chains at positions 16 and 20
  MOD_RES (24)..(24): Cys-PEG
HXEGTFTSDYSKYLDKRRAEDFVCWLMNT

SEQ ID NO: 331 - protein, 29 aa, Artificial Sequence
  Synthetic peptide
  MISC_FEATURE: c-term amidation
  MOD_RES (2)..(2): D-Ala
  MOD_RES (24)..(24): Cys-PEG
HXEGTFTSDYSKYLDERAAKDFVCWLMNT

SEQ ID NO: 332 - protein, 29 aa, Artificial Sequence
  Synthetic peptide
  MISC_FEATURE: c-term amidation
  MOD_RES (2)..(2): D-Ala
  MISC_FEATURE (16)..(20): Lactam ring between side chains at positions 16 and 20
  MOD_RES (24)..(24): Cys-PEG
HXEGTFTSDYSKYLDERAAKDFVCWLMNT

SEQ ID NO: 333 - protein, 29 aa, Artificial Sequence
  Synthetic peptide
  MISC_FEATURE: c-term amidation
  MOD_RES (2)..(2): D-Ala
  MISC_FEATURE (12)..(16): Lactam ring between side chains at positions 12 and 16
  MOD_RES (24)..(24): Cys-PEG
HXEGTFTSDYSKYLDERAAQDFVCWLMNT

SEQ ID NO: 334 - protein, 29 aa, Artificial Sequence
  Synthetic peptide
  MISC_FEATURE: c-term amidation
  MOD_RES (2)..(2): D-Ala
  MISC_FEATURE (12)..(16): Lactam ring between side chains at positions 12 and 16
  MOD_RES (24)..(24): Cys-PEG
HXEGTFTSDYSKYLDERAAKDFVCWLMNT

SEQ ID NO: 335 - protein, 29 aa, Artificial Sequence
  Synthetic peptide
  MISC_FEATURE: c-term amidation
  MOD_RES (2)..(2): D-Ala
  MISC_FEATURE (12)..(16): Lactam ring between side chainst at positions 16 and 20
  MOD_RES (24)..(24): Cys-PEG
HXEGTFTSDYSKYLDKRAAEDFVCWLMNT

SEQ ID NO: 336 - protein, 29 aa, Artificial Sequence
  Synthetic peptide
  MISC_FEATURE: c-term amidation
  MOD_RES (2)..(2): D-Ala
  MOD_RES (24)..(24): Cys-PEG
HXEGTFTSDYSKYLDEQAAKEFICWLMNT

SEQ ID NO: 337 - protein, 29 aa, Artificial Sequence
  Synthetic peptide
  MISC_FEATURE: c-term amidation
  MOD_RES (2)..(2): D-Ala
  MISC_FEATURE (12)..(16): Lactam ring between side chains at positions 12 and 16
  MOD_RES (24)..(24): Cys-PEG
HXEGTFTSDYSKYLDEQAAKEFICWLMNT

SEQ ID NO: 338 - protein, 29 aa, Artificial Sequence
  Synthetic peptide
  MISC_FEATURE: c-term amidation
  MOD_RES (2)..(2): D-Ala
  MISC_FEATURE (16)..(20): Lactam right between side chains at positions 16 and 20
  MOD_RES (24)..(24): Cys-PEG
HXEGTFTSDYSKYLDEQAAKEFICWLMNT

SEQ ID NO: 339 - protein, 29 aa, Artificial Sequence
  Synthetic peptide
  MISC_FEATURE: c-term amidation
  MOD_RES (2)..(2): D-Ala
  MOD_RES (24)..(24): Cys-PEG
HXEGTFTSDYSKYLDEQAAKEFICWLVKG

SEQ ID NO: 340 - protein, 29 aa, Artificial Sequence
  Synthetic peptide
  MISC_FEATURE: c-term amidation
  MOD_RES (2)..(2): D-Ala
  MISC_FEATURE (12)..(16): Lactam ring between side chains at positions 12 and 16
  MOD_RES (24)..(24): Cys-PEG
HXEGTFTSDYSKYLDEQAAKEFICWLVKG

SEQ ID NO: 341 - protein, 29 aa, Artificial Sequence
  Synthetic peptide
  MISC_FEATURE: c-term amidation
  MOD_RES (2)..(2): D-Ala
  MISC_FEATURE (16)..(20): Lactam ring between side chains at positions 16 and 20
  MOD_RES (24)..(24): Cys-PEG
HXEGTFTSDYSKYLDEQAAKEFICWLVKG

SEQ ID NO: 342 - protein, 29 aa, Artificial Sequence
  Synthetic peptide
  MISC_FEATURE: c-term amidation
  MOD_RES (16)..(16): Cys-PEG
HSQGTFTSDYSKYLDCRRAKDFVQWLMNT

SEQ ID NO: 343 - protein, 29 aa, Artificial Sequence
  Synthetic peptide
  MISC_FEATURE: c-term amidation
  MOD_RES (16)..(16): Cys-PEG
HSQGTFTSDYSKYLDCRAAKDFVQWLMNT

SEQ ID NO: 344 - protein, 29 aa, Artificial Sequence
  Synthetic peptide
  MISC_FEATURE: c-term amidation
  MOD_RES (16)..(16): Cys-PEG
HSQGTFTSDYSKYLDCQAAKEFIAWLMNT

SEQ ID NO: 345 - protein, 29 aa, Artificial Sequence
  Synthetic peptide
  MISC_FEATURE: c-term amidation
  MOD_RES (16)..(16): Cys-PEG
HSQGTFTSDYSKYLDCQAAKEFIAWLVKG

SEQ ID NO: 346 - protein, 29 aa, Artificial Sequence
  Synthetic peptide
  MISC_FEATURE: c-term amidation
  MOD_RES (1)..(1): (Des-amino)His
  MOD_RES (16)..(16): Cys-PEG
XSQGTFTSDYSKYLDCRRAKDFVQWLMNT

SEQ ID NO: 347 - protein, 29 aa, Artificial Sequence
  Synthetic peptide
  MISC_FEATURE: c-term amidation
  MOD_RES (1)..(1): (Des-amino)His
  MOD_RES (16)..(16): Cys-PEG
XSQGTFTSDYSKYLDCRAAKDFVQWLMNT

SEQ ID NO: 348 - protein, 29 aa, Artificial Sequence
  Synthetic peptide
  MISC_FEATURE: c-term amidation
  MOD_RES (1)..(1): (Des-amino)His
  MOD_RES (16)..(16): Cys-PEG
XSQGTFTSDYSKYLDCQAAKEFIAWLMNT

SEQ ID NO: 349 - protein, 29 aa, Artificial Sequence
  Synthetic peptide
  MISC_FEATURE: c-term amidation
  MOD_RES (1)..(1): (Des-amino)His
  MOD_RES (16)..(16): Cys-PEG
XSQGTFTSDYSKYLDCQAAKEFIAWLVKG

SEQ ID NO: 350 - protein, 29 aa, Artificial Sequence
  Synthetic peptide
  MISC_FEATURE: c-term amidation
  MOD_RES (1)..(1): (Des-amino)His
  MOD_RES (16)..(16): Cys-PEG
XSQGTFTSDYSKYLDCQAAKEFIAWLMNT

SEQ ID NO: 351 - protein, 29 aa, Artificial Sequence
  Synthetic peptide
  MISC_FEATURE: c-term amidation
  MOD_RES (2)..(2): Aminoisobutyric acid
  MOD_RES (16)..(16): Cys-PEG
HXQGTFTSDYSKYLDCRAAKDFVQWLMNT

SEQ ID NO: 352 - protein, 29 aa, Artificial Sequence
  Synthetic peptide
  MISC_FEATURE: c-term amidation
  MOD_RES (2)..(2): Aminoisobutyric acid
  MOD_RES (16)..(16): Cys-PEG
HXQGTFTSDYSKYLDCQAAKEFIAWLMNT

SEQ ID NO: 353 - protein, 29 aa, Artificial Sequence
  Synthetic peptide
  MISC_FEATURE: c-term amidation
  MOD_RES (2)..(2): Aminoisobutyric acid
  MOD_RES (16)..(16): Cys-PEG
HXQGTFTSDYSKYLDCQAAKEFIAWLVKG

SEQ ID NO: 354 - protein, 29 aa, Artificial Sequence
  Synthetic peptide
  MISC_FEATURE: c-term amidation
  MOD_RES (2)..(2): D-Ala
  MOD_RES (16)..(16): Cys-PEG
HXQGTFTSDYSKYLDCRRAKDFVQWLMNT

SEQ ID NO: 355 - protein, 29 aa, Artificial Sequence
  Synthetic peptide
  MISC_FEATURE: c-term amidation
  MOD_RES (2)..(2): D-Ala
  MOD_RES (16)..(16): Cys-PEG
HXQGTFTSDYSKYLDCRAAKDFVQWLMNT

SEQ ID NO: 356 - protein, 29 aa, Artificial Sequence
  Synthetic peptide
  MISC_FEATURE: c-term amidation
  MOD_RES (2)..(2): D-Ala
  MOD_RES (16)..(16): Cys-PEG
HXQGTFTSDYSKYLDCQAAKEFIAWLMNT

SEQ ID NO: 357 - protein, 29 aa, Artificial Sequence
  Synthetic peptide
  MISC_FEATURE: c-term amidation
  MOD_RES (2)..(2): D-Ala
  MOD_RES (16)..(16): Cys-PEG
HXQGTFTSDYSKYLDCQAAKEFIAWLVKG

SEQ ID NO: 358 - protein, 29 aa, Artificial Sequence
  Synthetic peptide
  MISC_FEATURE: c-term amidation
  MOD_RES (16)..(16): Cys-PEG
HSEGTFTSDYSKYLDCRRAKDFVQWLMNT

SEQ ID NO: 359 - protein, 29 aa, Artificial Sequence
  Synthetic peptide
  MISC_FEATURE: c-term amidation
  MOD_RES (16)..(16): Cys-PEG
HSEGTFTSDYSKYLDCRAAKDFVQWLMNT

SEQ ID NO: 360 - protein, 29 aa, Artificial Sequence
  Synthetic peptide
  MISC_FEATURE: c-term amidation
  MOD_RES (16)..(16): Cys-PEG
HSEGTFTSDYSKYLDCQAAKEFIAWLMNT

SEQ ID NO: 361 - protein, 29 aa, Artificial Sequence
  Synthetic peptide
  MISC_FEATURE: c-term amidation
  MOD_RES (16)..(16): Cys-PEG
HSEGTFTSDYSKYLDCQAAKEFIAWLVKG

SEQ ID NO: 362 - protein, 29 aa, Artificial Sequence
  Synthetic peptide
  MISC_FEATURE: c-term amidation
  MOD_RES (1)..(1): (Des-amino)His
  MOD_RES (16)..(16): Cys-PEG
XSEGTFTSDYSKYLDCRRAKDFVQWLMNT

SEQ ID NO: 363 - protein, 29 aa, Artificial Sequence
  Synthetic peptide
  MISC_FEATURE: c-term amidation
  MOD_RES (1)..(1): (Des-amino)His
  MOD_RES (16)..(16): Cys-PEG
XSEGTFTSDYSKYLDCRAAKDFVQWLMNT

SEQ ID NO: 364 - protein, 29 aa, Artificial Sequence
  Synthetic peptide
  MISC_FEATURE: c-term amidation
  MOD_RES (1)..(1): (Des-amino)His
  MOD_RES (16)..(16): Cys-PEG
XSEGTFTSDYSKYLDCQAAKEFIAWLMNT

SEQ ID NO: 365 - protein, 29 aa, Artificial Sequence
  Synthetic peptide
  MISC_FEATURE: c-term amidation
  MOD_RES (1)..(1): (Des-amino)His
  MOD_RES (16)..(16): Cys-PEG
XSEGTFTSDYSKYLDCQAAKEFIAWLVKG

SEQ ID NO: 366 - protein, 29 aa, Artificial Sequence
  Synthetic peptide
  MISC_FEATURE: c-term amidation
  MOD_RES (2)..(2): D-Ala
  MOD_RES (16)..(16): Cys-PEG
HXEGTFTSDYSKYLDCRRAKDFVQWLMNT

SEQ ID NO: 367 - protein, 29 aa, Artificial Sequence
  Synthetic peptide
  MISC_FEATURE: c-term amidation
  MOD_RES (2)..(2): D-Ala
  MOD_RES (16)..(16): Cys-PEG
HXEGTFTSDYSKYLDCRAAKDFVQWLMNT

SEQ ID NO: 368 - protein, 29 aa, Artificial Sequence
  Synthetic peptide
  MISC_FEATURE: c-term amidation
  MOD_RES (2)..(2): D-Ala
  MOD_RES (16)..(16): Cys-PEG
HXEGTFTSDYSKYLDCQAAKEFIAWLMNT

SEQ ID NO: 369 - protein, 29 aa, Artificial Sequence
  Synthetic peptide
  MISC_FEATURE: c-term amidation
  MOD_RES (2)..(2): D-Ala
  MOD_RES (16)..(16): Cys-PEG
HXEGTFTSDYSKYLDCQAAKEFIAWLVKG

SEQ ID NO: 370 - protein, 29 aa, Artificial Sequence
  Synthetic peptide
  MISC_FEATURE: c-term amidation
  MOD_RES (2)..(2): D-Ala
  MOD_RES (16)..(16): Cys-PEG
HXEGTFTSDYSKYLDCRRAKDFVQWLMNT

SEQ ID NO: 371 - protein, 29 aa, Artificial Sequence
  Synthetic peptide
  MISC_FEATURE: c-term amidation
  MOD_RES (2)..(2): D-Ala
  MOD_RES (16)..(16): Cys-PEG
HXEGTFTSDYSKYLDCRAAKDFVQWLMNT

SEQ ID NO: 372 - protein, 29 aa, Artificial Sequence
  Synthetic peptide
  MISC_FEATURE: c-term amidation
  MOD_RES (2)..(2): D-Ala
  MOD_RES (16)..(16): Cys-PEG
HXEGTFTSDYSKYLDCQAAKEFIAWLMNT

SEQ ID NO: 373 - protein, 29 aa, Artificial Sequence
  Synthetic peptide
  MISC_FEATURE: c-term amidation
  MOD_RES (2)..(2): D-Ala
  MOD_RES (16)..(16): Cys-PEG
HXEGTFTSDYSKYLDCQAAKEFIAWLVKG

SEQ ID NO: 374 - protein, 29 aa, Artificial Sequence
  Synthetic peptide
  MISC_FEATURE: c-term amidation
HSQGTFTSDYSKYLDERRAQDFVQWLMDT

SEQ ID NO: 375 - protein, 29 aa, Artificial Sequence
  Synthetic peptide
  MISC_FEATURE: c-term amidation
HSQGTFTSDYSKYLDERRAKDFVQWLMDT

SEQ ID NO: 376 - protein, 29 aa, Artificial Sequence
  Synthetic peptide
  MISC_FEATURE: c-term amidation
  MISC_FEATURE (16)..(20): Lactam ring between side chains at positions 16 and 20
HSQGTFTSDYSKYLDERRAKDFVQWLMDT

SEQ ID NO: 377 - protein, 29 aa, Artificial Sequence
  Synthetic peptide
  MISC_FEATURE: c-term amidation
  MISC_FEATURE (12)..(16): Lactam ring between side chains at positions 12 and 16
HSQGTFTSDYSKYLDERRAQDFVQWLMDT

SEQ ID NO: 378 - protein, 29 aa, Artificial Sequence
  Synthetic peptide
  MISC_FEATURE: c-term amidation
  MISC_FEATURE (12)..(16): Lactam ring between side chains at positions 12 and 16
HSQGTFTSDYSKYLDERRAKDFVQWLMDT

SEQ ID NO: 379 - protein, 29 aa, Artificial Sequence
  Synthetic peptide
  MISC_FEATURE: c-term amidation
  MISC_FEATURE (16)..(20): Lactam ring between side chains at positions 16 and 20
HSQGTFTSDYSKYLDKRRAEDFVQWLMDT

SEQ ID NO: 380 - protein, 29 aa, Artificial Sequence
  Synthetic peptide
  MISC_FEATURE: c-term amidation
HSQGTFTSDYSKYLDERAAKDFVQWLMDT

SEQ ID NO: 381 - protein, 29 aa, Artificial Sequence
  Synthetic peptide
  MISC_FEATURE: c-term amidation; lactam ring between side chains at positions 16 and 20
HSQGTFTSDYSKYLDERAAKDFVQWLMDT

SEQ ID NO: 382 - protein, 29 aa, Artificial Sequence
  Synthetic peptide
  MISC_FEATURE: c-term amidation
  MISC_FEATURE (12)..(16): Lactam ring between side chains at positions 12 and 16
HSQGTFTSDYSKYLDERAAQDFVQWLMDT

SEQ ID NO: 383 - protein, 29 aa, Artificial Sequence
  Synthetic peptide
  MISC_FEATURE: c-term amidation
  MISC_FEATURE (12)..(16): Lactam ring between side chains at positions 12 and 16
HSQGTFTSDYSKYLDERAAKDFVQWLMDT

SEQ ID NO: 384 - protein, 29 aa, Artificial Sequence
  Synthetic peptide
  MISC_FEATURE: c-term amidation
  MISC_FEATURE (16)..(20): Lactam ring between side chains at positions 16 and 20
HSQGTFTSDYSKYLDKRAAEDFVQWLMDT

SEQ ID NO: 385 - protein, 29 aa, Artificial Sequence
  Synthetic peptide
  MISC_FEATURE: c-term amidation
HSQGTFTSDYSKYLDEQAAKEFIAWLMDT

SEQ ID NO: 386 - protein, 29 aa, Artificial Sequence
  Synthetic peptide
  MISC_FEATURE: c-term amidation
  MISC_FEATURE (12)..(16): Lactam ring between side chains at positions 12 and 16
HSQGTFTSDYSKYLDEQAAKEFIAWLMDT

SEQ ID NO: 387 - protein, 29 aa, Artificial Sequence
  Synthetic peptide
  MISC_FEATURE: c-term amidation
  MISC_FEATURE (16)..(20): Lactam ring between side chains at positions 16 and 20
HSQGTFTSDYSKYLDEQAAKEFIAWLMDT

SEQ ID NO: 388 - protein, 29 aa, Artificial Sequence
  Synthetic peptide
  MISC_FEATURE: c-term amidation
  MOD_RES (1)..(1): (Des-amino)His
XSQGTFTSDYSKYLDERRAQDFVQWLMDT

SEQ ID NO: 389 - protein, 29 aa, Artificial Sequence
  Synthetic peptide
  MISC_FEATURE: c-term amidation
  MOD_RES (1)..(1): (Des-amino)His
XSQGTFTSDYSKYLDERRAKDFVQWLMDT

SEQ ID NO: 390 - protein, 29 aa, Artificial Sequence
  Synthetic peptide
  MISC_FEATURE: c-term amidation
  MOD_RES (1)..(1): (Des-amino)His
  MISC_FEATURE (16)..(20): Lactam ring between side chains at positions 16 and 20
XSQGTFTSDYSKYLDERRAKDFVQWLMDT

SEQ ID NO: 391 - protein, 29 aa, Artificial Sequence
  Synthetic peptide
  MISC_FEATURE: c-term amidation
  MOD_RES (1)..(1): (Des-amino)His
  MISC_FEATURE (12)..(16): Lactam ring between side chains at positions 12 and 16
XSQGTFTSDYSKYLDERRAQDFVQWLMDT

SEQ ID NO: 392 - protein, 29 aa, Artificial Sequence
  Synthetic peptide
  misc_feature (1)..(1): Xaa can be any naturally occurring amino acid
XSQGTFTSDYSKYLDERRAKDFVQWLMDT

SEQ ID NO: 393 - protein, 29 aa, Artificial Sequence
  Synthetic peptide
  MISC_FEATURE: c-term amidation
  MOD_RES (1)..(1): (Des-amino)His
  MISC_FEATURE (16)..(20): Lactam ring between side chains at positions 16 and 20
XSQGTFTSDYSKYLDKRRAEDFVQWLMDT

SEQ ID NO: 394 - protein, 29 aa, Artificial Sequence
  Synthetic peptide
  MISC_FEATURE: c-term amidation
  MOD_RES (1)..(1): (Des-amino)His
XSQGTFTSDYSKYLDERAAKDFVQWLMDT

SEQ ID NO: 395 - protein, 29 aa, Artificial Sequence
  Synthetic peptide
  MISC_FEATURE: c-term amidation
  MOD_RES (1)..(1): (Des-amino)His
  MISC_FEATURE (16)..(20): Lactam ring between side chains at positions 16 and 20
XSQGTFTSDYSKYLDERAAKDFVQWLMDT

SEQ ID NO: 396 - protein, 29 aa, Artificial Sequence
  Synthetic peptide
  MISC_FEATURE: c-term amidation
  MOD_RES (1)..(1): (Des-amino)His
  MISC_FEATURE (12)..(16): Lactam ring between side chains at positions 12 and 16
XSQGTFTSDYSKYLDERAAQDFVQWLMDT

SEQ ID NO: 397 - protein, 29 aa, Artificial Sequence
  Synthetic peptide
  MISC_FEATURE: c-term amidation
  MOD_RES (1)..(1): (Des-amino)His
  MISC_FEATURE (12)..(16): Lactam ring between side chains at positions 12 and 16
XSQGTFTSDYSKYLDERAAKDFVQWLMDT

SEQ ID NO: 398 - protein, 29 aa, Artificial Sequence
  Synthetic peptide
  MISC_FEATURE: c-term amidation
  MOD_RES (1)..(1): (Des-amino)His
  MISC_FEATURE (16)..(20): Lactam ring between side chains at positions 16 and 20
XSQGTFTSDYSKYLDKRAAEDFVQWLMDT

SEQ ID NO: 399 - protein, 29 aa, Artificial Sequence
  Synthetic peptide
  MISC_FEATURE: c-term amidation
  MOD_RES (1)..(1): (Des-amino)His
XSQGTFTSDYSKYLDEQAAKEFIAWLMDT

SEQ ID NO: 400 - protein, 29 aa, Artificial Sequence
  Synthetic peptide
  MISC_FEATURE: c-term amidation
  MOD_RES (1)..(1): (Des-amino)His
  MISC_FEATURE (12)..(16): Lactam ring between side chains at positions 12 and 16
XSQGTFTSDYSKYLDEQAAKEFIAWLMDT

SEQ ID NO: 401 - protein, 29 aa, Artificial Sequence
  Synthetic peptide
  MISC_FEATURE: c-term amidation
  MOD_RES (1)..(1): (Des-amino)His
  MISC_FEATURE (16)..(20): Lactam ring between side chains at positions 16 and 20
XSQGTFTSDYSKYLDEQAAKEFIAWLMDT

SEQ ID NO: 402 - protein, 29 aa, Artificial Sequence
  Synthetic peptide
  MISC_FEATURE: c-term amidation
  MOD_RES (2)..(2): Aminoisobutyric acid
HXQGTFTSDYSKYLDERRAQDFVQWLMDT

SEQ ID NO: 403 - protein, 29 aa, Artificial Sequence
  Synthetic peptide
  MISC_FEATURE: c-term amidation
  MOD_RES (2)..(2): Aminoisobutyric acid
HXQGTFTSDYSKYLDERRAKDFVQWLMDT

SEQ ID NO: 404 - protein, 29 aa, Artificial Sequence
  Synthetic peptide
  MISC_FEATURE: c-term amidation
  MOD_RES (2)..(2): Aminoisobutyric acid
  MISC_FEATURE (16)..(20): Lactam ring between side chains at positions 16 and 20
HXQGTFTSDYSKYLDERRAKDFVQWLMDT

SEQ ID NO: 405 - protein, 29 aa, Artificial Sequence
  Synthetic peptide
  MISC_FEATURE: c-term amidation
  MOD_RES (2)..(2): aminoisobutyric acid
  MISC_FEATURE (12)..(16): Lactam ring between side chains at positions 12 and 16
HXQGTFTSDYSKYLDERRAQDFVQWLMDT

SEQ ID NO: 406 - protein, 29 aa, Artificial Sequence
  Synthetic peptide
  MISC_FEATURE: c-term amidation
  MOD_RES (2)..(2): Aminoisobutyric acid
  MISC_FEATURE (12)..(16): Lactam ring between side chains at positions 12 and 16
HXQGTFTSDYSKYLDERRAKDFVQWLMDT

SEQ ID NO: 407 - protein, 29 aa, Artificial Sequence
  Synthetic peptide
  MISC_FEATURE: c-term amidation
  MOD_RES (2)..(2): Aminoisobutyric acid
  MISC_FEATURE (16)..(20): Lactam ring between side chains at positions 16 and 20
HXQGTFTSDYSKYLDKRRAEDFVQWLMDT

SEQ ID NO: 408 - protein, 29 aa, Artificial Sequence
  Synthetic peptide
  MOD_RES (2)..(2): Aminoisobutyric acid
  MISC_FEATURE (2)..(2): c-term amidation
HXQGTFTSDYSKYLDERAAKDFVQWLMDT

SEQ ID NO: 409 - protein, 29 aa, Artificial Sequence
  Synthetic peptide
  MISC_FEATURE: c-term amidation
  MOD_RES (2)..(2): Aminoisobutyric acid
  MISC_FEATURE (16)..(20): Lactam ring between side chains at positions 16 and 20
HXQGTFTSDYSKYLDERAAKDFVQWLMDT

SEQ ID NO: 410 - protein, 29 aa, Artificial Sequence
  Synthetic peptide
  MISC_FEATURE: c-term amidation
  MOD_RES (2)..(2): Aminoisobutyric acid
  MISC_FEATURE (12)..(16): Lactam ring between side chains at positions 12 and 16
HXQGTFTSDYSKYLDERAAQDFVQWLMDT

SEQ ID NO: 411 - protein, 29 aa, Artificial Sequence
  Synthetic peptide
  MISC_FEATURE: c-term amidation
  MOD_RES (2)..(2): Aminoisobutyric acid
  MISC_FEATURE (12)..(16): Lactam ring between side chains at positions 12 and 16
HXQGTFTSDYSKYLDERAAKDFVQWLMDT

SEQ ID NO: 412 - protein, 29 aa, Artificial Sequence
  Synthetic peptide
  MISC_FEATURE: c-term amidation
  MOD_RES (2)..(2): Aminoisobutyric acid
  MISC_FEATURE (12)..(16): Lactam ring between side chains at positions 16 and 20
HXQGTFTSDYSKYLDKRAAEDFVQWLMDT

SEQ ID NO: 413 - protein, 29 aa, Artificial Sequence
  Synthetic peptide
  MISC_FEATURE: c-term amidation
  MOD_RES (2)..(2): Aminoisobutyric acid
HXQGTFTSDYSKYLDEQAAKEFIAWLMDT

SEQ ID NO: 414 - protein, 29 aa, Artificial Sequence
  Synthetic peptide
  MISC_FEATURE: c-term amidation
  MOD_RES (2)..(2): Aminoisobutyric acid
  MISC_FEATURE (12)..(16): Lactam ring between side chains at positions 12 and 16
HXQGTFTSDYSKYLDEQAAKEFIAWLMDT

SEQ ID NO: 415 - protein, 29 aa, Artificial Sequence
  Synthetic peptide
  MISC_FEATURE: c-term amidation
  MOD_RES (2)..(2): Aminoisobutyric acid
  MISC_FEATURE (16)..(20): Lactam ring between side chains at positions 16 and 20
HXQGTFTSDYSKYLDEQAAKEFIAWLMDT

SEQ ID NO: 416 - protein, 29 aa, Artificial Sequence
  Synthetic peptide
  MISC_FEATURE: c-term amidation
  MOD_RES (2)..(2): D-Ala
HXQGTFTSDYSKYLDERRAQDFVQWLMDT

SEQ ID NO: 417 - protein, 29 aa, Artificial Sequence
  Synthetic peptide
  MISC_FEATURE: c-term amidation
  MOD_RES (2)..(2): D-Ala
HXQGTFTSDYSKYLDERRAKDFVQWLMDT

SEQ ID NO: 418 - protein, 29 aa, Artificial Sequence
  Synthetic peptide
  MISC_FEATURE: c-term amidation
  MOD_RES (2)..(2): D-Ala
  MISC_FEATURE (16)..(20): Lactam ring between side chains at positions 16 and 20
HXQGTFTSDYSKYLDERRAKDFVQWLMDT

SEQ ID NO: 419 - protein, 29 aa, Artificial Sequence
  Synthetic peptide
  MISC_FEATURE: c-term amidation
  MOD_RES (2)..(2): D-Ala
  MISC_FEATURE (12)..(16): Lactam ring between side chains at positions 12 and 16
HXQGTFTSDYSKYLDERRAQDFVQWLMDT

SEQ ID NO: 420 - protein, 29 aa, Artificial Sequence
  Synthetic peptide
  MISC_FEATURE: c-term amidation
  MOD_RES (2)..(2): D-Ala
  MISC_FEATURE (12)..(16): Lactam ring between side chains at positions 12 and 16
HXQGTFTSDYSKYLDERRAKDFVQWLMDT

SEQ ID NO: 421 - protein, 29 aa, Artificial Sequence
  Synthetic peptide
  MISC_FEATURE: c-term amidation
  MOD_RES (2)..(2): D-Ala
  MISC_FEATURE (16)..(20): Lactam ring between side chains at positions 16 and 20
HXQGTFTSDYSKYLDKRRAEDFVQWLMDT

SEQ ID NO: 422 - protein, 29 aa, Artificial Sequence
  Synthetic peptide
  MISC_FEATURE: c-term amidation
  MOD_RES (2)..(2): D-Ala
HXQGTFTSDYSKYLDERAAKDFVQWLMDT

SEQ ID NO: 423 - protein, 29 aa, Artificial Sequence
  Synthetic peptide
  MISC_FEATURE: c-term amidation
  MOD_RES (2)..(2): D-Ala
  MISC_FEATURE (16)..(20): Lactam ring between side chains at positions 16 and 20
HXQGTFTSDYSKYLDERAAKDFVQWLMDT

SEQ ID NO: 424 - protein, 29 aa, Artificial Sequence
  Synthetic peptide
  MISC_FEATURE: c-term amidation
  MOD_RES (2)..(2): D-Ala
  MISC_FEATURE (12)..(16): Lactam ring between side chains at positions 12 and 16
HXQGTFTSDYSKYLDERAAQDFVQWLMDT

SEQ ID NO: 425 - protein, 29 aa, Artificial Sequence
  Synthetic peptide
  MISC_FEATURE: c-term amidation
  MOD_RES (2)..(2): D-Ala
  MISC_FEATURE (12)..(16): Lactam ring between side chains at positions 12 and 16
HXQGTFTSDYSKYLDERAAKDFVQWLMDT

SEQ ID NO: 426 - protein, 29 aa, Artificial Sequence
  Synthetic peptide
  MISC_FEATURE: c-term amidation
  MOD_RES (2)..(2): D-Ala
  MISC_FEATURE (16)..(20): Lactam ring between side chains at positions 16 and 20
HXQGTFTSDYSKYLDKRAAEDFVQWLMDT

SEQ ID NO: 427 - protein, 29 aa, Artificial Sequence
  Synthetic peptide
  MISC_FEATURE: c-term amidation
  MOD_RES (2)..(2): D-Ala
HXQGTFTSDYSKYLDEQAAKEFIAWLMDT

SEQ ID NO: 428 - protein, 29 aa, Artificial Sequence
  Synthetic peptide
  MISC_FEATURE: c-term amidation
  MOD_RES (2)..(2): D-Ala
  MISC_FEATURE (12)..(16): Lactam ring between side chains at positions 12 and 16
HXQGTFTSDYSKYLDEQAAKEFIAWLMDT

SEQ ID NO: 429 - protein, 29 aa, Artificial Sequence
  Synthetic peptide
  MISC_FEATURE: c-term amidation
  MOD_RES (2)..(2): D-Ala
  MISC_FEATURE (16)..(20): Lactam ring between side chains at positions 16 and 20
HXQGTFTSDYSKYLDEQAAKEFIAWLMDT

SEQ ID NO: 430 - protein, 29 aa, Artificial Sequence
  Synthetic peptide
  MISC_FEATURE: c-term amidation
HSEGTFTSDYSKYLDERRAQDFVQWLMDT

SEQ ID NO: 431 - protein, 29 aa, Artificial Sequence
  Synthetic peptide
  MISC_FEATURE: c-term amidation
HSEGTFTSDYSKYLDERRAKDFVQWLMDT

SEQ ID NO: 432 - protein, 29 aa, Artificial Sequence
  Synthetic peptide
  MISC_FEATURE: c-term amidation
  MISC_FEATURE (16)..(20): Lactam ring between side chains at positions 16 and 20
HSEGTFTSDYSKYLDERRAKDFVQWLMDT

SEQ ID NO: 433 - protein, 29 aa, Artificial Sequence
  Synthetic peptide
  MISC_FEATURE: c-term amidation
  MISC_FEATURE (16)..(16): Lactam ring between side chains at positions 12 and 16
HSEGTFTSDYSKYLDERRAQDFVQWLMDT

SEQ ID NO: 434 - protein, 29 aa, Artificial Sequence
  Synthetic peptide
  MISC_FEATURE: c-term amidation
  MISC_FEATURE (12)..(16): Lactam ring between side chains at positions 12 and 16
HSEGTFTSDYSKYLDERRAKDFVQWLMDT

SEQ ID NO: 435 - protein, 29 aa, Artificial Sequence
  Synthetic peptide
  MISC_FEATURE: c-term amidation
  MISC_FEATURE (16)..(20): Lactam ring between side chains at positions 16 and 20
HSEGTFTSDYSKYLDKRRAEDFVQWLMDT

SEQ ID NO: 436 - protein, 29 aa, Artificial Sequence
  Synthetic peptide
  MISC_FEATURE: c-term amidation
HSEGTFTSDYSKYLDERAAKDFVQWLMDT

SEQ ID NO: 437 - protein, 29 aa, Artificial Sequence
  Synthetic peptide
  MISC_FEATURE: c-term amidation
  MISC_FEATURE: Lactam ring between side chains at positions 16 and 20
HSEGTFTSDYSKYLDERAAKDFVQWLMDT

SEQ ID NO: 438 - protein, 29 aa, Artificial Sequence
  Synthetic peptide
  MISC_FEATURE: c-term amidation
  MISC_FEATURE (12)..(16): Lactam ring between side chains at positions 12 and 16
HSEGTFTSDYSKYLDERAAQDFVQWLMDT

SEQ ID NO: 439 - protein, 29 aa, Artificial Sequence
  Synthetic peptide
  MISC_FEATURE: c-term amidation
  MISC_FEATURE (12)..(16): Lactam ring between side chains at positions 12 and 16
HSEGTFTSDYSKYLDERAAKDFVQWLMDT

SEQ ID NO: 440 - protein, 29 aa, Artificial Sequence
  Synthetic peptide
  MISC_FEATURE: c-term amidation
  MISC_FEATURE (16)..(20): Lactam ring between side chains at positions 16 and 20
HSEGTFTSDYSKYLDKRAAEDFVQWLMDT

SEQ ID NO: 441 - protein, 29 aa, Artificial Sequence
  Synthetic peptide
  MISC_FEATURE: c-term amidation
HSEGTFTSDYSKYLDEQAAKEFIAWLMDT

SEQ ID NO: 442 - protein, 29 aa, Artificial Sequence
  Synthetic peptide
  MISC_FEATURE: c-term amidation
  MISC_FEATURE (12)..(16): Lactam ring between side chains at positions 12 and 16
HSEGTFTSDYSKYLDEQAAKEFIAWLMDT

SEQ ID NO: 443 - protein, 29 aa, Artificial Sequence
  Synthetic peptide
  MISC_FEATURE: c-term amidation
  MISC_FEATURE (16)..(20): Lactam ring between side chains at positions 16 and 20
HSEGTFTSDYSKYLDEQAAKEFIAWLMDT

SEQ ID NO: 444 - protein, 29 aa, Artificial Sequence
  Synthetic peptide
  MISC_FEATURE: c-term amidation
  MOD_RES (1)..(1): (Des-amino)His
XSEGTFTSDYSKYLDERRAQDFVQWLMDT

SEQ ID NO: 445 - protein, 29 aa, Artificial Sequence
  Synthetic peptide
  MISC_FEATURE: c-term amidation
  MOD_RES (1)..(1): (Des-amino)His
XSEGTFTSDYSKYLDERRAKDFVQWLMDT

SEQ ID NO: 446 - protein, 29 aa, Artificial Sequence
  Synthetic peptide
  MISC_FEATURE: c-term amidation
  MOD_RES (1)..(1): (Des-amino)His
  MISC_FEATURE (16)..(20): Lactam ring between side chains at positions 16 and 20
XSEGTFTSDYSKYLDERRAKDFVQWLMDT

SEQ ID NO: 447 - protein, 29 aa, Artificial Sequence
  Synthetic peptide
  MISC_FEATURE: c-term amidation
  MISC_FEATURE: Lactam ring between side chains at positions 12 and 16
  MOD_RES (1)..(1): (Des-amino)His
XSEGTFTSDYSKYLDERRAQDFVQWLMDT

SEQ ID NO: 448 - protein, 29 aa, Artificial Sequence
  Synthetic peptide
  MISC_FEATURE: c-term amidation
  MOD_RES (1)..(1): (Des-amino)His
  MISC_FEATURE (12)..(16): Lactam ring between side chains at positions 12 and 16
XSEGTFTSDYSKYLDERRAKDFVQWLMDT

SEQ ID NO: 449 - protein, 29 aa, Artificial Sequence
  Synthetic peptide
  MISC_FEATURE: c-term amidation
  MOD_RES (1)..(1): (Des-amino)His
  MISC_FEATURE (16)..(20): Lactam ring between side chains at positions 16 and 20
XSEGTFTSDYSKYLDKRRAEDFVQWLMDT

SEQ ID NO: 450 - protein, 29 aa, Artificial Sequence
  Synthetic peptide
  MISC_FEATURE: c-term amidation
  MOD_RES (1)..(1): (Des-amino)His
XSEGTFTSDYSKYLDERAAKDFVQWLMDT

SEQ ID NO: 451 - protein, 29 aa, Artificial Sequence
  Synthetic peptide
  MISC_FEATURE: c-term amidation
  MOD_RES (1)..(1): (Des-amino)His
  MISC_FEATURE (16)..(20): Lactam ring between side chains at positions 16 and 20
XSEGTFTSDYSKYLDERAAKDFVQWLMDT

SEQ ID NO: 452 - protein, 29 aa, Artificial Sequence
  Synthetic peptide
  MISC_FEATURE: C-term amidation
  MOD_RES (1)..(1): (Des-amino)His
  MISC_FEATURE (12)..(16): Lactam ring between side chains at positions 12 and 16
XSEGTFTSDYSKYLDERAAQDFVQWLMDT

SEQ ID NO: 453 - protein, 29 aa, Artificial Sequence
  Synthetic peptide
  MISC_FEATURE: c-term amidation
  MOD_RES (1)..(1): (Des-amino)His
  MISC_FEATURE (12)..(16): Lactam ring between side chains at positions 12 and 16
XSEGTFTSDYSKYLDERAAKDFVQWLMDT

SEQ ID NO: 454 - protein, 29 aa, Artificial Sequence
  Synthetic peptide
  MISC_FEATURE: c-term amidation
  MOD_RES (1)..(1): (Des-amino)His
  MISC_FEATURE (16)..(20): Lactam ring between side chains at positions 16 and 20
XSEGTFTSDYSKYLDKRAAEDFVQWLMDT

SEQ ID NO: 455 - protein, 29 aa, Artificial Sequence
  Synthetic peptide
  MISC_FEATURE: c-term amidation
  MOD_RES (1)..(1): (Des-amino)His
XSEGTFTSDYSKYLDEQAAKEFIAWLMDT

SEQ ID NO: 456 - protein, 29 aa, Artificial Sequence
  Synthetic peptide
  MISC_FEATURE: c-term amidation
  MOD_RES (1)..(1): (Des-amino)His
  MISC_FEATURE (12)..(16): Lactam ring between side chains at positions 12 and 16
XSEGTFTSDYSKYLDEQAAKEFIAWLMDT

SEQ ID NO: 457 - protein, 29 aa, Artificial Sequence
  Synthetic peptide
  MISC_FEATURE: c-term amidation
  MOD_RES (1)..(1): (Des-amino)His
  MISC_FEATURE (16)..(20): Lactam ring between side chains at positions 16 and 20
XSEGTFTSDYSKYLDEQAAKEFIAWLMDT

SEQ ID NO: 458 - protein, 29 aa, Artificial Sequence
  Synthetic peptide
  MISC_FEATURE: c-term amidation
  MOD_RES (2)..(2): Aminoisobutyric acid
HXEGTFTSDYSKYLDERRAQDFVQWLMDT

SEQ ID NO: 459 - protein, 29 aa, Artificial Sequence
  Synthetic peptide
  MISC_FEATURE: c-term amidation
  MOD_RES (2)..(2): Aminoisobutyric acid
HXEGTFTSDYSKYLDERRAKDFVQWLMDT

SEQ ID NO: 460 - protein, 29 aa, Artificial Sequence
  Synthetic peptide
  MISC_FEATURE: c-term amidation
  MOD_RES (2)..(2): Aminoisobutyric acid
  MISC_FEATURE (16)..(20): Lactam ring between side chains at positions 16 and 20
HXEGTFTSDYSKYLDERRAKDFVQWLMDT

SEQ ID NO: 461 - protein, 29 aa, Artificial Sequence
  Synthetic peptide
  MISC_FEATURE: c-term amidation
  MOD_RES (2)..(2): Aminoisobutyric acid
  MISC_FEATURE (12)..(16): Lactam ring between side chains at positions 12 and 16
HXEGTFTSDYSKYLDERRAQDFVQWLMDT

SEQ ID NO: 462 - protein, 29 aa, Artificial Sequence
  Synthetic peptide
  MISC_FEATURE: c-term amidation
  MOD_RES (2)..(2): Aminoisobutyric acid
  MISC_FEATURE (12)..(16): Lactam ring between side chains at positions 12 and 16
HXEGTFTSDYSKYLDERRAKDFVQWLMDT

SEQ ID NO: 463 - protein, 29 aa, Artificial Sequence
  Synthetic peptide
  MISC_FEATURE: c-term amidation
  MOD_RES (2)..(2): Aminoisobutyric acid
  MISC_FEATURE (16)..(20): Lactam ring between side chains at positions 16 and 20
HXEGTFTSDYSKYLDKRRAEDFVQWLMDT

SEQ ID NO: 464 - protein, 29 aa, Artificial Sequence
  Synthetic peptide
  MISC_FEATURE: c-term amidation
  MOD_RES (2)..(2): Aminoisobutyric acid
HXEGTFTSDYSKYLDERAAKDFVQWLMDT

SEQ ID NO: 465 - protein, 29 aa, Artificial Sequence
  Synthetic peptide
  MISC_FEATURE: c-term amidation
  MOD_RES (2)..(2): Aminoisobutyric acid
  MISC_FEATURE (16)..(20): Lactam ring between side chains at positions 16 and 20
HXEGTFTSDYSKYLDERAAKDFVQWLMDT

SEQ ID NO: 466 - protein, 29 aa, Artificial Sequence
  Synthetic peptide
  MISC_FEATURE: c-term amidation
  MOD_RES (2)..(2): Aminoisobutyric acid
  MISC_FEATURE (12)..(16): Lactam ring between side chains at postions 12 and 16
HXEGTFTSDYSKYLDERAAQDFVQWLMDT

SEQ ID NO: 467 - protein, 29 aa, Artificial Sequence
  Synthetic peptide
  MISC_FEATURE: c-term amidation
  MOD_RES (2)..(2): Aminoisobutyric acid
  MISC_FEATURE (12)..(16): Lactam ring between side chains at positions 12 and 16
HXEGTFTSDYSKYLDERAAKDFVQWLMDT

SEQ ID NO: 468 - protein, 29 aa, Artificial Sequence
  Synthetic peptide
  MISC_FEATURE: c-term amidation
  MOD_RES (2)..(2): Aminoisobutyric acid
  MISC_FEATURE (12)..(16): Lactam ring between side chains at positions 16 and 20
HXEGTFTSDYSKYLDKRAAEDFVQWLMDT

SEQ ID NO: 469 - protein, 29 aa, Artificial Sequence
  Synthetic peptide
  MISC_FEATURE: c-term amidation
  MOD_RES (2)..(2): Aminoisobutyric acid
HXEGTFTSDYSKYLDEQAAKEFIAWLMDT

SEQ ID NO: 470 - protein, 29 aa, Artificial Sequence
  Synthetic peptide
  MISC_FEATURE: c-term amidation
  MOD_RES (2)..(2): Aminoisobutyric acid
  MISC_FEATURE (12)..(16): Lactam ring between side chains at positions 12 and 16
HXEGTFTSDYSKYLDEQAAKEFIAWLMDT

SEQ ID NO: 471 - protein, 29 aa, Artificial Sequence
  Synthetic peptide
  MISC_FEATURE: c-term amidation
  MOD_RES (2)..(2): Aminoisobutyric acid
  MISC_FEATURE (16)..(20): Lactam ring between side chains at positions 16 and 20
HXEGTFTSDYSKYLDEQAAKEFIAWLMDT

SEQ ID NO: 472 - protein, 29 aa, Artificial Sequence
  Synthetic peptide
  MISC_FEATURE: c-term amidation
  MOD_RES (2)..(2): D-Ala
HXEGTFTSDYSKYLDERRAQDFVQWLMDT

SEQ ID NO: 473 - protein, 29 aa, Artificial Sequence
  Synthetic peptide
  MISC_FEATURE: c-term amidation
  MOD_RES (2)..(2): D-Ala
HXEGTFTSDYSKYLDERRAKDFVQWLMDT

SEQ ID NO: 474 - protein, 29 aa, Artificial Sequence
  Synthetic peptide
  MISC_FEATURE: c-term amidation
  MOD_RES (2)..(2): D-Ala
  MISC_FEATURE (16)..(20): Lactam ring between side chains at positions 16 and 20
HXEGTFTSDYSKYLDERRAKDFVQWLMDT

SEQ ID NO: 475 - protein, 29 aa, Artificial Sequence
  Synthetic peptide
  MISC_FEATURE: c-term amidation
  MOD_RES (2)..(2): D-Ala
  MISC_FEATURE (12)..(16): Lactam ring between side chains at positions 12 and 16
HXEGTFTSDYSKYLDERRAQDFVQWLMDT

SEQ ID NO: 476 - protein, 29 aa, Artificial Sequence
  Synthetic peptide
  MISC_FEATURE: c-term amidation
  MOD_RES (2)..(2): D-Ala
  MISC_FEATURE (12)..(16): Lactam ring between side chains at positions 12 and 16
HXEGTFTSDYSKYLDERRAKDFVQWLMDT

SEQ ID NO: 477 - protein, 29 aa, Artificial Sequence
  Synthetic peptide
  MISC_FEATURE: c-term amidation
  MOD_RES (2)..(2): D-Ala
  MISC_FEATURE (16)..(20): Lactam ring between side chains at positions 16 and 20
HXEGTFTSDYSKYLDKRRAEDFVQWLMDT

SEQ ID NO: 478 - protein, 29 aa, Artificial Sequence
  Synthetic peptide
  MISC_FEATURE: c-term amidation
  MOD_RES (2)..(2): D-Ala
HXEGTFTSDYSKYLDERAAKDFVQWLMDT

SEQ ID NO: 479 - protein, 29 aa, Artificial Sequence
  Synthetic peptide
  MISC_FEATURE: c-term amidation
  MOD_RES (2)..(2): D-Ala
  MISC_FEATURE (16)..(20): Lactam ring between side chains at positions 16 and 20
HXEGTFTSDYSKYLDERAAKDFVQWLMDT

SEQ ID NO: 480 - protein, 29 aa, Artificial Sequence
  Synthetic peptide
  MISC_FEATURE: c-term amidation
  MOD_RES (2)..(2): D-Ala
  MISC_FEATURE (12)..(16): Lactam ring between side chains at positions 12 and 16
HXEGTFTSDYSKYLDERAAQDFVQWLMDT

SEQ ID NO: 481 - protein, 29 aa, Artificial Sequence
  Synthetic peptide
  MISC_FEATURE: c-term amidation
  MOD_RES (2)..(2): D-Ala
  MISC_FEATURE (12)..(16): Lactam ring between side chains at positions 12 and 16
HXEGTFTSDYSKYLDERAAKDFVQWLMDT

SEQ ID NO: 482 - protein, 29 aa, Artificial Sequence
  Synthetic peptide
  MISC_FEATURE: c-term amidation
  MOD_RES (2)..(2): D-Ala
  MISC_FEATURE (16)..(20): Lactam ring between side chains at positions 16 and 20
HXEGTFTSDYSKYLDKRAAEDFVQWLMDT

SEQ ID NO: 483 - protein, 29 aa, Artificial Sequence
  Synthetic peptide
  MISC_FEATURE: c-term amidation
  MOD_RES (2)..(2): D-Ala
HXEGTFTSDYSKYLDEQAAKEFIAWLMDT

SEQ ID NO: 484 - protein, 29 aa, Artificial Sequence
  Synthetic peptide
  MISC_FEATURE: c-term amidation
  MOD_RES (2)..(2): D-Ala
  MISC_FEATURE (12)..(16): Lactam ring between side chains at positions 12 and 16
HXEGTFTSDYSKYLDEQAAKEFIAWLMDT

SEQ ID NO: 485 - protein, 29 aa, Artificial Sequence
  Synthetic peptide
  MISC_FEATURE: c-term amidation
  MOD_RES (2)..(2): D-Ala
  MISC_FEATURE (16)..(20): Lactam ring between side chains at positions 16 and 20
HXEGTFTSDYSKYLDEQAAKEFIAWLMDT

SEQ ID NO: 486 - protein, 29 aa, Artificial Sequence
  Synthetic peptide
  MISC_FEATURE: c-term amidation
  MOD_RES (2)..(2): Aminoisobutyric acid
  MOD_RES (24)..(24): Cys-PEG
HXQGTFTSDYSKYLDEQAAKEFICWLMNT

SEQ ID NO: 487 - protein, 29 aa, Artificial Sequence
  Synthetic peptide
  MISC_FEATURE: c-term amidation
  MOD_RES (2)..(2): Aminoisobutyric acid
  MOD_RES (29)..(29): Cys-PEG
HXQGTFTSDYSKYLDEQAAKEFIAWLMNC

SEQ ID NO: 488 - protein, 40 aa, Artificial Sequence
  Synthetic peptide
  MISC_FEATURE: c-term amidation
  MOD_RES (2)..(2): Aminoisobutyric acid
  MOD_RES (40)..(40): Cys-PEG
HXQGTFTSDYSKYLDEQAAKEFIAWLMNGGPSSGAPPPSC

SEQ ID NO: 489 - protein, 40 aa, Artificial Sequence; identical to SEQ ID NO: 488
  Synthetic peptide
  MISC_FEATURE: c-term amidation
  MOD_RES (2)..(2): Aminoisobutyric acid
  MISC_FEATURE (16)..(20): Lactam ring between side chains at positions 16 and 20
  MOD_RES (40)..(40): Cys-PEG

SEQ ID NO: 490 - protein, 39 aa, Artificial Sequence
  Synthetic peptide
  MISC_FEATURE: c-term amidation
  MOD_RES (2)..(2): Aminoisobutyric acid
  MOD_RES (24)..(24): Cys-PEG
HXQGTFTSDYSKYLDEQAAKEFICWLMNGGPSSGAPPPS

SEQ ID NO: 491 - protein, 39 aa, Artificial Sequence; identical to SEQ ID NO: 490
  Synthetic peptide
  MISC_FEATURE: c-term amidation
  MOD_RES (2)..(2): Aminoisobutyric acid
  MISC_FEATURE (16)..(20): Lactam ring between side chains at positions 16 and 20
  MOD_RES (24)..(24): Cys-PEG

SEQ ID NO: 492 - protein, 29 aa, Artificial Sequence
  Synthetic peptide
  MISC_FEATURE: c-term amidation
  MOD_RES (2)..(2): Aminoisobutyric acid
  MOD_RES (24)..(24): Cys-PEG
HXQGTFTSDYSKYLDERAAKDFVCWLMNT

SEQ ID NO: 493 - protein, 29 aa, Artificial Sequence
  Synthetic peptide
  MISC_FEATURE: c-term amidation
  MOD_RES (2)..(2): Aminoisobutyric acid
  MOD_RES (24)..(24): Cys-PEG
HXQGTFTSDYSKYLDERAAKDFVQWLMNC

SEQ ID NO: 494 - protein, 40 aa, Artificial Sequence
  Synthetic peptide
  MISC_FEATURE: c-term amidation
  MOD_RES (2)..(2): Aminoisobutyric acid
  MOD_RES (24)..(24): Cys-PEG
HXQGTFTSDYSKYLDERAAKDFVQWLMNGGPSSGAPPPSC

SEQ ID NO: 495 - protein, 40 aa, Artificial Sequence; identical to SEQ ID NO: 494
  Synthetic peptide
  MISC_FEATURE: c-term amidation
  MOD_RES (2)..(2): Aminoisobutyric acid
  MISC_FEATURE (16)..(20): Lactam ring between side chains at positions 16 and 20
  MOD_RES (40)..(40): Cys-PEG

SEQ ID NO: 496 - protein, 39 aa, Artificial Sequence
  Synthetic peptide
  MISC_FEATURE: c-term amidation
  MOD_RES (2)..(2): Aminoisobutyric acid
  MOD_RES (24)..(24): Cys-PEG
HXQGTFTSDYSKYLDERAAKDFVCWLMNGGPSSGAPPPS

SEQ ID NO: 497 - protein, 39 aa, Artificial Sequence; identical to SEQ ID NO: 496
  Synthetic peptide
  MISC_FEATURE: c-term amidation
  MOD_RES (2)..(2): Aminoisobutyric acid
  MISC_FEATURE (16)..(20): Lactam ring between side chains at positions 16 and 20
  MOD_RES (24)..(24): Cys-PEG

SEQ ID NO: 498 - protein, 30 aa, Artificial Sequence
  Synthetic peptide
  MISC_FEATURE: c-term amidation
  MOD_RES (2)..(2): Aminoisobutyric acid
  MOD_RES (24)..(24): Cys-PEG
HXQGTFTSDYSKYLDERRAKDFVCWLMNTA

SEQ ID NO: 499 - protein, 29 aa, Artificial Sequence
  Synthetic peptide
  MISC_FEATURE: c-term amidation
  MOD_RES (2)..(2): Aminoisobutyric acid
  MOD_RES (24)..(24): Cys-PEG
HXQGTFTSDYSKYLDERRAKDFVQWLMNC

SEQ ID NO: 500 - protein, 40 aa, Artificial Sequence
  Synthetic peptide
  MISC_FEATURE: c-term amidation
  MOD_RES (2)..(2): Aminoisobutyric acid
  MOD_RES (40)..(40): Cys-PEG
HXQGTFTSDYSKYLDERRAKDFVQWLMNGGPSSGAPPPSC

SEQ ID NO: 501 - protein, 40 aa, Artificial Sequence; identical to SEQ ID NO: 500
  Synthetic peptide
  MISC_FEATURE: c-term amidation
  MOD_RES (2)..(2): Aminoisobutyric acid
  MISC_FEATURE (16)..(20): Lactam ring between side chains at positions 16 and 20
  MOD_RES (40)..(40): Cys-PEG

SEQ ID NO: 502 - protein, 39 aa, Artificial Sequence
  Synthetic peptide
  MISC_FEATURE: c-term amidation
  MOD_RES (2)..(2): Aminoisobutyric acid
  MOD_RES (24)..(24): Cys-PEG
HXQGTFTSDYSKYLDERRAKDFVCWLMNGGPSSGAPPPS

SEQ ID NO: 503 - protein, 39 aa, Artificial Sequence; identical to SEQ ID NO: 502
  Synthetic peptide
  MISC_FEATURE: c-term amidation
  MOD_RES (2)..(2): Aminoisobutyric acid
  MISC_FEATURE (16)..(20): Lactam ring between side chains at positions 16 and 20
  MOD_RES (24)..(24): Cys-PEG

SEQ ID NO: 504 - protein, 29 aa, Artificial Sequence
  Synthetic peptide
  MISC_FEATURE: c-term amidation
  MOD_RES (2)..(2): Aminoisobutyric acid
  MISC_FEATURE (16)..(20): Lactam ring between side chains at positions 16 and 20
  MOD_RES (24)..(24): Cys-PEG
HXQGTFTSDYSKYLDEQAAKEFICWLMNT

SEQ ID NO: 505 - protein, 29 aa, Artificial Sequence
  Synthetic peptide
  MISC_FEATURE: c-term amidation
  MOD_RES (1)..(1): Alpha, Alpha-Dimethyl Imidiazole Acetic Acid
  MISC_FEATURE (16)..(20): Lactam ring between side chains at positions 16 and 20
  MOD_RES (24)..(24): Cys-PEG
XSQGTFTSDYSKYLDEQAAKEFICWLMNT

SEQ ID NO: 506 - protein, 29 aa, Artificial Sequence
  Synthetic peptide
  MISC_FEATURE: c-term amidation
  MOD_RES (1)..(1): Alpha, Alpha-Dimethly Imidiazole Acetic Acid
  MOD_RES (1)..(1): Alpha, Alpha-Dimethly Imidiazole Acetic Acid
  MISC_FEATURE (16)..(20): Lactam ring between side chains at positions 16 and 20
  MOD_RES (29)..(29): Cys-PEG
XSQGTFTSDYSKYLDEQAAKEFIAWLMNC

SEQ ID NO: 507 - protein, 40 aa, Artificial Sequence
  Synthetic peptide
  MISC_FEATURE: c-term amidation
  MOD_RES (1)..(1): Alpha, Alpha Dimethyl Imidiazole Acetic Acid
  MISC_FEATURE (16)..(20): Lactam ring between side chains at positions 16 and 20
  MOD_RES (40)..(40): Cys-PEG
XSQGTFTSDYSKYLDEQAAKEFIAWLMNGGPSSGAPPPSC

SEQ ID NO: 508 - protein, 40 aa, Artificial Sequence
  Synthetic peptide
  MISC_FEATURE: c-term amidation
  MOD_RES (1)..(1): Alpha, Alpha Dimethyl Imidiazole Acetic Acid
  MISC_FEATURE (16)..(20): Lactam ring between side chains at positions 16 and 20
  MOD_RES (40)..(40): Cys-PEG
XSQGTFTSDYSKYLDERRAKDFVQWLMNGGPSSGAPPPSC

SEQ ID NO: 509 - protein, 39 aa, Artificial Sequence
  Synthetic peptide
  MISC_FEATURE: c-term amidation
  MOD_RES (1)..(1): Alpha, Alpha Dimethyl Imidiazole Acetic Acid
  MISC_FEATURE (16)..(20): Lactam ring between side chains at positions 16 and 20
  MOD_RES (24)..(24): Cys-PEG
XSQGTFTSDYSKYLDEQAAKEFICWLMNGGPSSGAPPPS

SEQ ID NO: 510 - protein, 29 aa, Artificial Sequence
  Synthetic peptide
  MISC_FEATURE: c-term amidation
  MOD_RES (1)..(1): Alpha, Alpha Dimethyl Imidiazole Acetic Acid
  misc_feature (2)..(2): Xaa can be any naturally occurring amino acid
  MISC_FEATURE (16)..(20): Lactam ring between side chains at positions 16 and 20
  MOD_RES (24)..(24): Cys-PEG
HXQGTFTSDYSKYLDERRAKDFVCWLMNT

SEQ ID NO: 511 - protein, 29 aa, Artificial Sequence
  Synthetic peptide
  MISC_FEATURE: c-term amidation
  MOD_RES (2)..(2): Alpha, Alpha Dimethyl Imidiazole Acetic Acid
  MISC_FEATURE (16)..(20): Lactam ring between side chains at positions 16 and 20
  MOD_RES (24)..(24): Cys-PEG
HXQGTFTSDYSKYLDERRAKDFVCWLMNT

SEQ ID NO: 512 - protein, 29 aa, Artificial Sequence
  Synthetic peptide
  MISC_FEATURE: c-term amidation
  MOD_RES (1)..(1): Alpha, Alpha Dimethyl Imidiazole Acetic Acid
  MISC_FEATURE (16)..(20): Lactam ring between side chains at positions 16 and 20
  MOD_RES (29)..(29): Cys-PEG
XSQGTFTSDYSKYLDERRAKDFVQWLMNC

SEQ ID NO: 513 - protein, 39 aa, Artificial Sequence
  Synthetic peptide
  MISC_FEATURE: c-term amidation
  MOD_RES (1)..(1): Alpha, Alpha Dimethyl Imidiazole Acetic Acid
  MISC_FEATURE (16)..(20): Lactam ring between side chains at positions 16 and 20
  MOD_RES (24)..(24): Cys-PEG
XSQGTFTSDYSKYLDERRAKDFVCWLMNGGPSSGAPPPS

SEQ ID NO: 514 - protein, 29 aa, Artificial Sequence
  Synthetic peptide
  MISC_FEATURE: c-term amidation
  MISC_FEATURE (16)..(20): Lactam ring between side chains at positions 16 and 20
  MOD_RES (24)..(24): Cys-PEG
HSQGTFTSDYSKYLDEQAAKEFICWLMNT

SEQ ID NO: 515 - protein, 11 aa, Artificial Sequence
  Synthetic peptide
GGPSSGAPPPS

SEQ ID NO: 516 - protein, 12 aa, Artificial Sequence
  Synthetic peptide
  MOD_RES (12)..(12): Cys-PEG
GGPSSGAPPPSC

SEQ ID NO: 517 - protein, 29 aa, Artificial Sequence
  Synthetic peptide
  MISC_FEATURE: c-term amidation
  MOD_RES (2)..(2): Aminoisobutyric acid
  MISC_FEATURE (16)..(20): Lactam ring between side chains at positions 16 and 20
  MOD_RES (24)..(24): Cys-PEG
HXQGTFTSDYSKYLDERRAKDFVCWLMNT

SEQ ID NO: 518 - protein, 29 aa, Artificial Sequence
  Synthetic peptide
  MISC_FEATURE: c-term amidation
  MOD_RES (24)..(24): Cys-PEG
HSQGTFTSDYSKYLDEQAAKEFICWLMNT

SEQ ID NO: 519 - protein, 29 aa, Artificial Sequence
  Synthetic peptide
  MISC_FEATURE: c-term amidation
  MOD_RES (1)..(1): Alpha, Alpha Dimethly Imidiazole Acetic Acid
  MOD_RES (24)..(24): Cys-PEG
XSQGTFTSDYSKYLDEQAAKEFICWLMNT

SEQ ID NO: 520 - protein, 29 aa, Artificial Sequence
  Synthetic peptide
  MISC_FEATURE: c-term amidation
  MOD_RES (1)..(1): Alpha, Alpha Dimethyl Imidiazole Acetic Acid
  MOD_RES (29)..(29): Cys-PEG
XSQGTFTSDYSKYLDEQAAKEFIAWLMNC

SEQ ID NO: 521 - protein, 39 aa, Artificial Sequence
  Synthetic peptide
  MISC_FEATURE: c-term amidation
HSQGTFTSDYSKYLDSRRAQDFVQWLMNTGPSSGAPPPS

SEQ ID NO: 522 - protein, 39 aa, Artificial Sequence
  Synthetic peptide
  MISC_FEATURE: c-term amidation
HSQGTFTSDYSKYLDSRRAQDFVQWLMNGGPSSGAPPPS

SEQ ID NO: 523 - protein, 39 aa, Artificial Sequence
  Synthetic peptide
  MISC_FEATURE: c-term amidation
HSQGTFTSDYSKYLDSRRAQDFVQWLMKGGPSSGAPPPS

SEQ ID NO: 524 - protein, 39 aa, Artificial Sequence
  Synthetic peptide
  MISC_FEATURE: c-term amidation
HSQGTFTSDYSKYLDSRRAQDFVQWLVKGGPSSGAPPPS

SEQ ID NO: 525 - protein, 39 aa, Artificial Sequence
  Synthetic peptide
  MISC_FEATURE: c-term amidation
HSQGTFTSDYSKYLDSRRAQDFVQWLMDGGPSSGAPPPS

SEQ ID NO: 526 - protein, 39 aa, Artificial Sequence
  Synthetic peptide
  MISC_FEATURE: c-term amidation
HSQGTFTSDYSKYLDERRAKDFVQWLMDGGPSSGAPPPS

SEQ ID NO: 527 - protein, 30 aa, Artificial Sequence
  Synthetic peptide
  MISC_FEATURE: c-term amidation
HAEGTFTSDVSSYLEGQAAKEFIAWLVKGG

SEQ ID NO: 528 - protein, 29 aa, Artificial Sequence
  Synthetic peptide
  MISC_FEATURE: c-term amidation
  MOD_RES (2)..(2): Aminoisobutyric acid
  MISC_FEATURE (16)..(20): Lactam ring between side chains at positions 16 and 20
  MOD_RES (24)..(24): Cys-PEG
HXQGTFTSDYSKYLDERRAKDFVCWLMNT

SEQ ID NO: 529 - protein, 39 aa, Artificial Sequence; identical to SEQ ID NO: 513
  Synthetic peptide
  MISC_FEATURE: c-term amidation
  MOD_RES (1)..(1): Alpha, Alpha Dimethyl Imidiazole Acetic Acid
  MOD_RES (24)..(24): Cys-PEG

SEQ ID NO: 530 - protein, 29 aa, Artificial Sequence
  Synthetic peptide
  MISC_FEATURE: c-term amidation
  MOD_RES (1)..(1): Alpha, Alpha Dimethyl Imidiazole Acetic Acid
  MOD_RES (24)..(24): Cys-PEG
XSQGTFTSDYSKYLDERRAKDFVCWLMNT

SEQ ID NO: 531 - protein, 40 aa, Artificial Sequence
  Synthetic peptide
  MISC_FEATURE: c-term amidation
  MOD_RES (2)..(2): Aminoisobutyric acid
  MOD_RES (24)..(24): Cys-PEG
  MOD_RES (40)..(40): Cys-PEG
HXQGTFTSDYSKYLDERRAKEFICWLMNGGPSSGAPPPSC

SEQ ID NO: 532 - protein, 41 aa, Artificial Sequence
  Synthetic peptide
  MISC_FEATURE: c-term amidation
  MOD_RES (2)..(2): Aminoisobutyric acid
  MOD_RES (40)..(40): Cys-PEG
  MOD_RES (41)..(41): Cys-PEG
HXQGTFTSDYSKYLDEQAAKEFIAWLMNGGPSSGAPPPSCC

SEQ ID NO: 533 - protein, 39 aa, Artificial Sequence; identical to SEQ ID NO: 490
  Synthetic peptide
  MOD_RES (2)..(2): Aminoisobutyric acid
  MOD_RES (24)..(24): Cys-PEG
  MISC_FEATURE (24)..(24): c-term amidation

SEQ ID NO: 534 - protein, 29 aa, Artificial Sequence
  Synthetic peptide
  MISC_FEATURE: Chimera 2 AIB2 K10-C8 Cys 24-40K
  MISC_FEATURE: c-term amidation
  MOD_RES (2)..(2): Aminoisobutyric acid
  MOD_RES (10)..(10): Acylated with C8 fatty acid
  MOD_RES (24)..(24): Cys-PEG
HXQGTFTSDKSKYLDEQAAKEFICWLMNT

SEQ ID NO: 535 - protein, 29 aa, Artificial Sequence
  Synthetic peptide
  MISC_FEATURE: Chimera 2 AIB2 K10-C14 Cys 24-40K
  MISC_FEATURE: c-term amidation
  MOD_RES (2)..(2): Aminoisobutyric acid
  MOD_RES (10)..(10): Acylated with C14 fatty acid
  MOD_RES (24)..(24): Cys-PEG
HXQGTFTSDKSKYLDEQAAKEFICWLMNT

SEQ ID NO: 536 - protein, 29 aa, Artificial Sequence
  Synthetic peptide
  MISC_FEATURE: Chimera 2 AIB2 K10-C16 Cys24-40K
  MISC_FEATURE: c-term amidation
  MOD_RES (2)..(2): Aminoisobutyric acid
  MOD_RES (10)..(10): Acylated with C16 fatty acid
  MOD_RES (24)..(24): Cys-PEG
HXQGTFTSDKSKYLDEQAAKEFICWLMNT

SEQ ID NO: 537 - protein, 29 aa, Artificial Sequence
  Synthetic peptide
  MISC_FEATURE: Chimera 2 AIB2 K10-C18 Cys24-40K
  MISC_FEATURE: c-term amidation
  MOD_RES (2)..(2): Aminoisobutyric acid
  MOD_RES (10)..(10): Acylated with C18 fatty acid
  MOD_RES (24)..(24): Cys-PEG
HXQGTFTSDKSKYLDEQAAKEFICWLMNT

SEQ ID NO: 538 - protein, 29 aa, Artificial Sequence
  Synthetic peptide
  MISC_FEATURE: Chimera 2 K10-C18 Cys24-40K
  MISC_FEATURE: c-term amidation
  MOD_RES (10)..(10): Acylated with C18 fatty acid
  MOD_RES (24)..(24): Cys-PEG
HSQGTFTSDKSKYLDEQAAKEFICWLMNT

SEQ ID NO: 539 - protein, 29 aa, Artificial Sequence
  Synthetic peptide
  MISC_FEATURE: Glucagon E16 K20 K10-C18 Cys24-40K
  MOD_RES (10)..(10): Acylated with C18 fatty acid
  MOD_RES (24)..(24): Cys-PEG
HSQGTFTSDKSKYLDERRAKDFVCWLMNT

SEQ ID NO: 540 - protein, 29 aa, Artificial Sequence
  Synthetic peptide
  MISC_FEATURE: Glucagon E16 K20 K10-W-C18
  MISC_FEATURE: c-term amidation
  MOD_RES (10)..(10): Covalently bound to Trp residue comprising a C18 fatty acid
HSQGTFTSDKSKYLDERRAKDFVQWLMNT

SEQ ID NO: 541 - protein, 29 aa, Artificial Sequence
  Synthetic peptide
  MISC_FEATURE: Glucagon E16 K20 K10-W-C16 Cys24-40K
  MOD_RES (10)..(10): Covalently bound to Trp residue comprising a C16 fatty acid
  MOD_RES (24)..(24): Cys-PEG
HSQGTFTSDKSKYLDERRAKDFVCWLMNT

SEQ ID NO: 542 - protein, 29 aa, Artificial Sequence
  Synthetic peptide
  MISC_FEATURE: Glucagon E16 K20 K10-C16
  MISC_FEATURE: c-term amidation
  MOD_RES (10)..(10): Covalently bound to C16 fatty acid
HSQGTFTSDKSKYLDERRAKDFVQWLMNT

SEQ ID NO: 543 - protein, 29 aa, Artificial Sequence
  Synthetic peptide
  MISC_FEATURE: Glucagon E16 K20 K10-C16
  MISC_FEATURE: c-term amidation
  MOD_RES (10)..(10): Covalently bound to Trp residue comprising a C16 fatty acid
HSQGTFTSDKSKYLDERRAKDFVQWLMNT

SEQ ID NO: 544 - protein, 29 aa, Artificial Sequence
  Synthetic peptide
  MISC_FEATURE: Glucagon E16 K20 K10-C18
  MISC_FEATURE: c-term amidation
  MOD_RES (10)..(10): Covalently bound to C18 fatty acid
HSQGTFTSDKSKYLDERRAKDFVQWLMNT

SEQ ID NO: 545 - protein, 29 aa, Artificial Sequence
  Synthetic peptide
  MISC_FEATURE: Glucagon E16 K20
  MISC_FEATURE: c-term amidation
HSQGTFTSDYSKYLDERRAKDFVQWLMNT

SEQ ID NO: 546 - protein, 29 aa, Artificial Sequence
  Synthetic peptide
  MISC_FEATURE: Glucagon E16 K20 K10-W-C16 Cys 24-40K
  MISC_FEATURE: c-term amidation
  MOD_RES (10)..(10): Covalently bound to Trp residue comprising C16 fatty acid
  MOD_RES (24)..(24): Cys-PEG
HSQGTFTSDKSKYLDERRAKDFVCWLMNT

SEQ ID NO: 547 - protein, 29 aa, Artificial Sequence
  Synthetic peptide
  MISC_FEATURE: Glucagon E16 K20 K10-C18 Cys24-40K
  MISC_FEATURE: c-term amidation
  MOD_RES (10)..(10): Covalently bound to C18 fatty acid
  MOD_RES (24)..(24): Cys-PEG
HSQGTFTSDKSKYLDERRAKDFVCWLMNT

SEQ ID NO: 548 - protein, 29 aa, Artificial Sequence
  Synthetic peptide
  MISC_FEATURE: Glucagon E16 K20 K10-C18 Cys24-40K
  MISC_FEATURE: c-term amidation
  MOD_RES (10)..(10): Covalently bound to Trp residue comprising a C18 fatty acid
  MOD_RES (24)..(24): Cys-PEG
HSQGTFTSDKSKYLDERRAKDFVCWLMNT

SEQ ID NO: 549 - protein, 29 aa, Artificial Sequence
  Synthetic peptide
  MISC_FEATURE: Glucagon E16 K20 K10-C16 amide
  MISC_FEATURE: c-term amidation
  MOD_RES (10)..(10): Covalently bound to Glu residue comprising a C16 fatty acid
  MOD_RES (24)..(24): Cys-PEG
HSQGTFTSDKSKYLDERRAQDFVCWLMNT

SEQ ID NO: 550 - protein, 28 aa, Artificial Sequence
  Synthetic peptide
  MISC_FEATURE: Chimera 2 truncated by one amino acid
HSQGTFTSDYSKYLDEQAAKEFIAWLMN

SEQ ID NO: 551 - protein, 27 aa, Artificial Sequence
  Synthetic peptide
  MISC_FEATURE: Chimera 2 truncated by two amino acids
HSQGTFTSDYSKYLDEQAAKEFIAWLM

SEQ ID NO: 552 - protein, 28 aa, Artificial Sequence
  Synthetic peptide
  MISC_FEATURE: aa 1-28, E16 K20 C-terminal amide
  MISC_FEATURE: c-term amidation
HSQGTFTSDYSKYLDERRAKDFVQWLMN

SEQ ID NO: 553 - protein, 27 aa, Artificial Sequence
  Synthetic peptide
  MISC_FEATURE: aa 1-27 E16 K20 C-terminal amide
  MISC_FEATURE: c-term amidation
HSQGTFTSDYSKYLDERRAKDFVQWKM

SEQ ID NO: 554 - protein, 29 aa, Artificial Sequence
  Synthetic peptide
  MISC_FEATURE: c-term amidation
  MOD_RES (27)..(27): Norleucine
HSEGTFTSDYSKYLDEQAAKEFIAWLXNT

SEQ ID NO: 555 - protein, 39 aa, Artificial Sequence
  Synthetic peptide
  MISC_FEATURE (16)..(20): Lactam bridging side chains at positions 16 and 20
YSQGTFTSDYSKYLDEQAAKEFVNWLMNGGPSSGAPPPS

SEQ ID NO: 556 - protein, 29 aa, Artificial Sequence
  Synthetic peptide
  MISC_FEATURE: Chimera 2 with AIB at 16
  MISC_FEATURE: c-term amidation
  MOD_RES (16)..(16): Aminoisobutyric acid
HSQGTFTSDYSKYLDXQAAKEFIAWLMNT

SEQ ID NO: 557 - protein, 29 aa, Artificial Sequence
  Synthetic peptide
  MISC_FEATURE: c-term amidation
  MOD_RES (2)..(2): Aminoisobutyric acid
  MOD_RES (16)..(16): Aminoisobutyric acid
HXQGTFTSDYSKYLDXRRAQDFVQWLMNT

SEQ ID NO: 558 - protein, 29 aa, Artificial Sequence
  Synthetic peptide
  MISC_FEATURE: c-term amidation
  MOD_RES (2)..(2): Aminoisobutyric acid
  MISC_FEATURE (10)..(10): Covalently bound to Trp residue comprising a C16 fatty acid
  MOD_RES (16)..(16): Aminoisobutyric acid
  MOD_RES (24)..(24): Cys-PEG
HXQGTFTSDKSKYLDXRRAQDFVCWLMNT

SEQ ID NO: 559 - protein, 29 aa, Artificial Sequence
  Synthetic peptide
  MISC_FEATURE: c-term amidation
  MOD_RES (2)..(2): Aminoisobutric Acid
  MISC_FEATURE (10)..(10): Covalently bound to Trp residue comprising a C16 fatty acid
  MOD_RES (16)..(16): Aminoisobutric Acid
HXQGTFTSDKSKYLDXRRAQDFVCWLMNT

SEQ ID NO: 560 - protein, 29 aa, Artificial Sequence
  Synthetic peptide
  MISC_FEATURE: c-term amidation
  MOD_RES (2)..(2): Aminoisobutyric acid
  MISC_FEATURE (10)..(10): Covalently bound to Trp residue comprising a C16 fatty acid
  MOD_RES (16)..(16): Aminoisobutyric acid
  MOD_RES (20)..(20): Aminoisobutyric acid
  MOD_RES (24)..(24): Cys-PEG
HXQGTFTSDKSKYLDXRRAXDFVCWLMNT

SEQ ID NO: 561 - protein, 29 aa, Artificial Sequence
  Synthetic peptide
  MISC_FEATURE: c-term amidation
  MOD_RES (2)..(2): Aminoisobutyric acid
  MISC_FEATURE (10)..(10): Covalently bound to Trp residue comprising a C16 fatty acid
  MOD_RES (16)..(16): Aminoisobutyric acid
  MOD_RES (20)..(20): Aminoisobutyric acid
HXQGTFTSDKSKYLDXRRAXDFVCWLMNT

SEQ ID NO: 562 - protein, 29 aa, Artificial Sequence
  Synthetic peptide
  MISC_FEATURE: c-term amidation
  MOD_RES (2)..(2): Aminoisobutyric acid
  MOD_RES (16)..(16): Aminoisobutyric acid
HXQGTFTSDKSKYLDXRRAQDFVQWLMNT

SEQ ID NO: 563 - protein, 29 aa, Artificial Sequence
  Synthetic peptide
  MISC_FEATURE: c-term amidation
  MOD_RES (2)..(2): Aminoisobutyric Acid
  MOD_RES (10)..(10): Acylated with a C16 fatty acyl group
  MOD_RES (16)..(16): Aminoisobutyric Acid
HXQGTFTSDKSKYLDXRRAQDFVQWLMNT

SEQ ID NO: 564 - protein, 29 aa, Artificial Sequence
  Synthetic peptide
  MISC_FEATURE: c-term amidation
  MOD_RES (2)..(2): Aminoisobutyric Acid
  MOD_RES (10)..(10): Acylated with a C16 fatty acyl group via Ala-Ala spacer
  MOD_RES (16)..(16): Aminoisobutyric Acid
HXQGTFTSDKSKYLDXRRAQDFVQWLMNT

SEQ ID NO: 565 - protein, 29 aa, Artificial Sequence
  Synthetic peptide
  MISC_FEATURE: c-term amidation
  MOD_RES (2)..(2): Aminoisobutryic Acid
  MOD_RES (10)..(10): Acylated with a C16 fatty acyl group via gamma-Glu-gamma-Glu spacer
  MOD_RES (16)..(16): Aminoisobutryic Acid
HXQGTFTSDKSKYLDXRRAQDFVQWLMNT

SEQ ID NO: 566 - protein, 29 aa, Artificial Sequence
  Synthetic peptide
  MISC_FEATURE: c-term amidation
  MOD_RES (2)..(2): Aminoisobutryic Acid
  MOD_RES (10)..(10): Acylated with a C16 fatty acyl group via beta-Ala-beta-Ala spacer
  MOD_RES (16)..(16): Aminoisobutryic Acid
HXQGTFTSDKSKYLDXRRAQDFVQWLMNT

SEQ ID NO: 567 - protein, 29 aa, Artificial Sequence
  Synthetic peptide
  MISC_FEATURE: c-term amidation
  MOD_RES (2)..(2): Aminoisobutryic Acid
  MOD_RES (10)..(10): Acylated with a C16 fatty acyl group via 6-aminohexanoic acid spacer
  MOD_RES (16)..(16): Aminoisobutryic Acid
HXQGTFTSDKSKYLDXRRAQDFVQWLMNT

SEQ ID NO: 568 - protein, 29 aa, Artificial Sequence
  Synthetic peptide
  MISC_FEATURE: c-term amidation
  MOD_RES (2)..(2): Aminoisobutryic Acid
  MOD_RES (10)..(10): Acylated with a C16 fatty acyl group via Leu-Leu spacer
  MOD_RES (16)..(16): Aminoisobutryic Acid
HXQGTFTSDKSKYLDXRRAQDFVQWLMNT

SEQ ID NO: 569 - protein, 29 aa, Artificial Sequence
  Synthetic peptide
  MISC_FEATURE: c-term amidation
  MOD_RES (2)..(2): Aminoisobutryic Acid
  MOD_RES (10)..(10): Acylated with a C16 fatty acyl group via Pro-Pro spacer
  MOD_RES (16)..(16): Aminoisobutryic Acid
HXQGTFTSDKSKYLDXRRAQDFVQWLMNT

SEQ ID NO: 570 - protein, 29 aa, Artificial Sequence
  Synthetic peptide
  MISC_FEATURE: c-term amidation
  MOD_RES (2)..(2): Aminoisobutyric Acid
  MOD_RES (10)..(10): Acylated with a C14 fatty acyl group
  MOD_RES (16)..(16): Aminoisobutyric Acid
  MOD_RES (24)..(24): Pegylated
HXQGTFTSDKSKYLDXRRAQDFVCWLMNT

SEQ ID NO: 571 - protein, 29 aa, Artificial Sequence
  Synthetic peptide
  MISC_FEATURE: c-term amidation
  MOD_RES (2)..(2): Aminoisobutyric Acid
  MOD_RES (10)..(10): Acylated with a C14 fatty acyl group via gamma-Glu-gamma-Glu spacer
  MOD_RES (16)..(16): Aminoisobutyric Acid
  MOD_RES (24)..(24): Pegylated
HXQGTFTSDKSKYLDXRRAQDFVCWLMNT

SEQ ID NO: 572 - protein, 29 aa, Artificial Sequence
  Synthetic peptide
  MISC_FEATURE: c-term amidation
  MOD_RES (2)..(2): Aminoisobutryic Acid
  MOD_RES (10)..(10): Acylated with a C14 fatty acyl group via gamma-Glu-gamma-Glu spacer
  MOD_RES (16)..(16): Aminoisobutryic Acid
HXQGTFTSDKSKYLDXRRAQDFVQWLMNT

SEQ ID NO: 573 - protein, 29 aa, Artificial Sequence
  Synthetic peptide
  MISC_FEATURE: c-term amidation
  MOD_RES (2)..(2): Aminoisobutryic Acid
  MOD_RES (10)..(10): Acylated with a C14 fatty acyl group via Ala-Ala spacer
  MOD_RES (16)..(16): Aminoisobutryic Acid
  MOD_RES (24)..(24): Pegylated
HXQGTFTSDKSKYLDXRRAQDFVCWLMNT

SEQ ID NO: 574 - protein, 29 aa, Artificial Sequence
  Synthetic peptide
  MISC_FEATURE: c-term amidation
  MOD_RES (2)..(2): Aminoisobutryic Acid
  MOD_RES (10)..(10): Acylated with a C14 fatty acyl group via Ala-Ala spacer
  MOD_RES (16)..(16): Aminoisobutryic Acid
HXQGTFTSDKSKYLDXRRAQDFVQWLMNT

SEQ ID NO: 575 - protein, 29 aa, Artificial Sequence
  Synthetic peptide
  MISC_FEATURE: c-term amidation
  MOD_RES (2)..(2): Aminoisobutryic acid
  MOD_RES (10)..(10): Acylated with a C16 fatty acyl group via Ala-Ala spacer
  MOD_RES (16)..(16): Aminoisobutryic acid
  MOD_RES (24)..(24): Pegylated
HXQGTFTSDKSKYLDXRRAQDFVCWLMNT

SEQ ID NO: 576 - protein, 29 aa, Artificial Sequence
  Synthetic peptide
  MISC_FEATURE: c-term amidation
  MOD_RES (2)..(2): Aminoisobutryic Acid
  MOD_RES (10)..(10): Acylated with a C16 fatty acyl group via gamma-Glu-gamma-Glu spacer
  MOD_RES (16)..(16): Aminoisobutryic Acid
  MOD_RES (24)..(24): Pegylated
HXQGTFTSDKSKYLDXRRAQDFVCWLMNT

SEQ ID NO: 577 - protein, 29 aa, Artificial Sequence
  Synthetic peptide
  MISC_FEATURE: c-term amidation
  MOD_RES (10)..(10): Acylated with a C16 fatty acyl group
HSQGTFTSDKSKYLDSRRAQDFVQWLMNT

SEQ ID NO: 578 - protein, 29 aa, Artificial Sequence
  Synthetic peptide
  MISC_FEATURE: c-term amidation
  MOD_RES (10)..(10): Acylated with a C16 fatty acyl group via gamma-Glu-gamma-Glu spacer
HSQGTFTSDKSKYLDSRRAQDFVQWLMNT

SEQ ID NO: 579 - protein, 29 aa, Artificial Sequence
  Synthetic peptide
  MISC_FEATURE: AA-C16 Glucagon Amide
  MISC_FEATURE: c-term amidation
  MOD_RES (10)..(10): Acylated with a C16 fatty acyl group via Ala-Ala spacer
HSQGTFTSDKSKYLDSRRAQDFVQWLMNT

SEQ ID NO: 580 - protein, 29 aa, Artificial Sequence
  Synthetic peptide
  MISC_FEATURE: Chimera 2, AIB2, Lys10, Cys24-PEG
  MISC_FEATURE: c-term amidation
  MOD_RES (2)..(2): Aminoisobutryic Acid
  MOD_RES (24)..(24): Pegylated
HXQGTFTSDKSKYLDEQAAKEFICWLMNT

SEQ ID NO: 581 - protein, 30 aa, Artificial Sequence
  Synthetic peptide
  MISC_FEATURE: Peptide dS2E16K20K30-C14 Gluc Amide
  MISC_FEATURE: c-term amidation
  MOD_RES (2)..(2): Xaa is d-Ser
  MOD_RES (30)..(30): Acylated with a C14 fatty acyl group
HXQGTFTSDYSKYLDERRAKDFVQWLMNTK

SEQ ID NO: 582 - protein, 29 aa, Artificial Sequence
  Synthetic peptide
  MISC_FEATURE: Peptide dS2K10(C14)E16K20-Gluc Amide
  MISC_FEATURE: c-term amidation
  MOD_RES (2)..(2): Xaa is d-Ser
  MOD_RES (10)..(10): Acylated with a C14 fatty acyl group
HXQGTFTSDKSKYLDERRAKDFVQWLMNT

SEQ ID NO: 583 - protein, 30 aa, Artificial Sequence; identical to SEQ ID NO: 581
  Synthetic peptide
  MISC_FEATURE: Peptide dS2E16K20K30-C16 Gluc Amide
  MISC_FEATURE: c-term amidation
  MOD_RES (2)..(2): Xaa is d-Ser
  MOD_RES (30)..(30): Acylated with a C16 fatty acyl group

SEQ ID NO: 584 - protein, 29 aa, Artificial Sequence
  Synthetic peptide
  MISC_FEATURE: Peptide dS2K10(C16)E16K20-Gluc Amide
  MISC_FEATURE: c-term amidation
  MOD_RES (2)..(2): Xaa is d-Ser
  MOD_RES (10)..(10): Acylated with a C16 fatty acyl group
HXQGTFTSDKSKYLDERRAKDFVQWLMNT

SEQ ID NO: 585 - protein, 29 aa, Artificial Sequence
  Synthetic peptide
  MISC_FEATURE: Peptide Chimera 2-AIB2-K10-acylated
  MISC_FEATURE: c-term amidation
  MOD_RES (2)..(2): Aminoisobutryic Acid
  MOD_RES (10)..(10): Acylated with a C18 fatty acyl group
  MOD_RES (24)..(24): Pegylated
HXQGTFTSDKSKYLDEQAAKEFICWLMNT

SEQ ID NO: 586 - protein, 30 aa, Artificial Sequence
  Synthetic peptide
  MISC_FEATURE: Peptide Chimera 2-AIB2-K30-acylated
  MISC_FEATURE: c-term amidation
  MOD_RES (2)..(2): Aminoisobutryic Acid
  MOD_RES (24)..(24): Pegylated
  MOD_RES (30)..(30): Acylated with a C18 fatty acyl group
HXQGTFTSDYSKYLDEQAAKEFICWLMNTK

SEQ ID NO: 587 - protein, 29 aa, Artificial Sequence
  Synthetic peptide
  MISC_FEATURE: c-term amidation
  MOD_RES (1)..(1): DMIA
XSQGTFTSDYSKYLDERRAKDFVCWLMNT

SEQ ID NO: 588 - protein, 29 aa, Artificial Sequence
  Synthetic peptide
  MISC_FEATURE: c-term amidation
  MOD_RES (1)..(1): DMIA
  MOD_RES (16)..(20): Lactam ring between side chains of amino acids at positions 16 and 20
XSQGTFTSDYSKYLDERRAKDFVCWLMNT

SEQ ID NO: 589 - protein, 29 aa, Artificial Sequence
  Synthetic peptide
  MISC_FEATURE: c-term amidation
  MOD_RES (2)..(2): Aminoisobutryic Acid
HXEGTFTSDYSKYLDEQAAKEFICWLMNT

SEQ ID NO: 590 - protein, 29 aa, Artificial Sequence
  Synthetic peptide
  MISC_FEATURE: c-term amidation
  MOD_RES (2)..(2): Aminoisobutryic Acid
  MOD_RES (24)..(24): Pegylated
HXEGTFTSDYSKYLDEQAAKEFICWLMNT

SEQ ID NO: 591 - protein, 29 aa, Artificial Sequence
  Synthetic peptide
  MOD_RES (3)..(3): Xaa is a Glutamine analog
  MOD_RES (27)..(27): Xaa is Norleucine
HSXGTFTSDYSKYLDTRRAAEFVAWLXDE

SEQ ID NO: 592 - protein, 29 aa, Artificial Sequence
  Synthetic peptide
  MOD_RES (3)..(3): Xaa is a Glutamine analog
  MOD_RES (16)..(16): Xaa is Aib
HSXGTFTSDYSKYLDXRRAADFVAWLMDE

SEQ ID NO: 593 - protein, 29 aa, Artificial Sequence
  Synthetic peptide
  MOD_RES (27)..(27): Xaa is Norleucine
HSQGTFTSDYSKYLDTRRAAEFVAWLXDE

SEQ ID NO: 594 - protein, 29 aa, Artificial Sequence
  Synthetic peptide
  MOD_RES (3)..(3): Xaa is Acetamidomethyl-cysteine
  MOD_RES (27)..(27): Xaa is Norleucine
HSXGTFTSDYSKYLDTRRAAEFVAWLXDE

SEQ ID NO: 595 - protein, 29 aa, Artificial Sequence
  Synthetic peptide
  MOD_RES (3)..(3): Xaa is Acetyldiaminobutanoic acid
  MOD_RES (27)..(27): Xaa is Norleucine
HSXGTFTSDYSKYLDTRRAAEFVAWLXDE

SEQ ID NO: 596 - protein, 29 aa, Artificial Sequence
  Synthetic peptide
  MOD_RES (3)..(3): Xaa is carbamoyldiaminopropanoic acid
  MOD_RES (27)..(27): Xaa is Norleucine
HSXGTFTSDYSKYLDTRRAAEFVAWLXDE

SEQ ID NO: 597 - protein, 29 aa, Artificial Sequence
  Synthetic peptide
  MOD_RES (3)..(3): Xaa is Methylglutamine
  MOD_RES (27)..(27): Xaa is Norleucine
HSXGTFTSDYSKYLDTRRAAEFVAWLXDE

SEQ ID NO: 598 - protein, 29 aa, Artificial Sequence
  Synthetic peptide
  MOD_RES (3)..(3): Xaa is Methionine sulfoxide
  MOD_RES (27)..(27): Xaa is Norleucine
HSXGTFTSDYSKYLDTRRAAEFVAWLXDE

SEQ ID NO: 599 - protein, 29 aa, Artificial Sequence
  Synthetic peptide
  MOD_RES (3)..(3): Acetylornithine
  MOD_RES (27)..(27): Xaa is Norleucine
HSXGTFTSDYSKYLDTRRAAEFVAWLXDE

SEQ ID NO: 600 - protein, 29 aa, Artificial Sequence
  Synthetic peptide
  MOD_RES (16)..(16): Xaa is Aminoisobutryic Acid
HSQGTFTSDYSKYLDXRRAADFVAWLMDE

SEQ ID NO: 601 - protein, 29 aa, Artificial Sequence
  Synthetic peptide
  MOD_RES (3)..(3): Xaa is Acetyldiaminobutanoic acid
  MOD_RES (16)..(16): Xaa is Aminoisobutyric Acid
HSXGTFTSDYSKYLDXRRAADFVAWLMDE

SEQ ID NO: 602 - protein, 29 aa, Artificial Sequence
  Synthetic peptide
  MOD_RES (3)..(3): Xaa is Methylglutamine
  MOD_RES (16)..(16): Xaa is Aminoisobutyric Acid
HSXGTFTSDYSKYLDXRRAADFVAWLMDE

SEQ ID NO: 603 - protein, 29 aa, Artificial Sequence
  Synthetic peptide
  MOD_RES (3)..(3): Xaa is Acetyldiaminobutanoic acid
  MOD_RES (16)..(16): Xaa is Aminoisobutryic Acid
HSXGTFTSDYSKYLDXRRAADFVAWLLDE

SEQ ID NO: 604 - protein, 39 aa, Artificial Sequence
  Synthetic peptide
  MISC_FEATURE: c-term amidation
  MOD_RES (3)..(3): Xaa is Acetyldiaminobutanoic acid
  MOD_RES (16)..(16): Xaa is Aminoisobutyric Acid
HSXGTFTSDYSKYLDXRRAADFVAWLLDTGPSSGAPPPS

SEQ ID NO: 605 - protein, 29 aa, Artificial Sequence
  Synthetic peptide
  MOD_RES (3)..(3): Xaa is Acetyldiaminobutanoic acid
  MOD_RES (16)..(16): Xaa is Aminoisobutryic Acid
HSXGTFTSDYSKYLDXRRASDFVSWLLDE

SEQ ID NO: 606 - protein, 29 aa, Artificial Sequence
  Synthetic peptide
  MOD_RES (3)..(3): Xaa is Acetyldiaminobutanoic acid
  MOD_RES (16)..(16): Xaa is Aminoisobutryic Acid
HSXGTFTSDYSKYLDXRRATDFVTWLLDE

SEQ ID NO: 607 - protein, 29 aa, Artificial Sequence
  Synthetic peptide
  MISC_FEATURE: c-term amidation
  MOD_RES (1)..(1): Xaa is Dmia
  MOD_RES (10)..(10): Covalently bound to a C14 fatty acyl group
  MOD_RES (16)..(20): Lactam ring between side chains of amino acids at positions 16 and 20
XSQGTFTSDKSKYLDERRAKDFVQWLMNT

SEQ ID NO: 608 - protein, 29 aa, Artificial Sequence
  Synthetic peptide
  MISC_FEATURE: c-term amidation
  MOD_RES (1)..(1): DMIA
  MOD_RES (10)..(10): Covalently bound to C16 fatty acyl group
  MOD_RES (16)..(20): Lactam ring between side chains of amino acids at positions 16 and 20
XSQGTFTSDKSKYLDERRAKDFVQWLMNT

SEQ ID NO: 609 - protein, 29 aa, Artificial Sequence
  Synthetic peptide
  MISC_FEATURE: c-term amidation
  MOD_RES (1)..(1): DMIA
  MOD_RES (10)..(10): Covalently bound to C18 fatty acyl group
  MOD_RES (16)..(20): Lactam ring between side chains of amino acids at positions 16 and 20
XSQGTFTSDKSKYLDERRAKDFVQWLMNT

SEQ ID NO: 610 - protein, 29 aa, Artificial Sequence
  Synthetic peptide
  MISC_FEATURE: c-term amidation
  MOD_RES (2)..(2): Aminoisobutryic Acid
  MOD_RES (10)..(10): Covalently bound to C14 fatty acyl group
  MOD_RES (16)..(16): Aminoisobutryic Acid
HXQGTFTSDKSKYLDXRRAQDFVQWLMNT

SEQ ID NO: 611 - protein, 29 aa, Artificial Sequence
  Synthetic peptide
  MISC_FEATURE: c-term amidation
  MOD_RES (2)..(2): Aminoisobutryic Acid
  MOD_RES (10)..(10): Covalently bound to C16 fatty acyl group
  MOD_RES (16)..(16): Aminoisobutryic Acid
HXQGTFTSDKSKYLDXRRAQDFVQWLMNT

SEQ ID NO: 612 - protein, 29 aa, Artificial Sequence
  Synthetic peptide
  MISC_FEATURE: c-term amidation
  MOD_RES (2)..(2): Aminoisobutryic Acid
  MOD_RES (10)..(10): Covalently bound to C18 fatty acyl group
  MOD_RES (16)..(16): Aminoisobutryic Acid
HXQGTFTSDKSKYLDXRRAQDFVQWLMNT

SEQ ID NO: 613 - protein, 29 aa, Artificial Sequence
  Synthetic peptide
  MISC_FEATURE: c-term amidation
  MOD_RES (2)..(2): Xaa is d-Ser
  MOD_RES (10)..(10): Covalently bound to C14 fatty acyl group
HXQGTFTSDKSKYLDERRAKDFVQWLMNT

SEQ ID NO: 614 - protein, 29 aa, Artificial Sequence
  Synthetic peptide
  MISC_FEATURE: c-term amidation
  MOD_RES (2)..(2): Xaa is d-Ser
  MOD_RES (10)..(10): Covalently bound to C16 fatty acyl group
HXQGTFTSDKSKYLDERRAKDFVQWLMNT

SEQ ID NO: 615 - protein, 29 aa, Artificial Sequence
  Synthetic peptide
  MISC_FEATURE: c-term amidation
  MOD_RES (2)..(2): Xaa is d-Ser
  MOD_RES (10)..(10): Covalently bound to a C18 fatty acyl group
HXQGTFTSDKSKYLDERRAKDFVQWLMNT

SEQ ID NO: 616 - protein, 29 aa, Artificial Sequence
  Synthetic peptide
  MISC_FEATURE: c-term amidation
  MOD_RES (2)..(2): Aminoisobutyric Acid
  MOD_RES (10)..(10): Covalently bound to a C14 fatty acyl group
  MOD_RES (16)..(16): Aminoisobutyric Acid
HXQGTFTSDKSKYLDXRRAQDFVCWLMNT

SEQ ID NO: 617 - protein, 29 aa, Artificial Sequence
  Synthetic peptide
  MISC_FEATURE: c-term amidation
  MOD_RES (2)..(2): Aminoisobutryic Acid
  MOD_RES (10)..(10): Covalently bound to C14 fatty acyl group via gamma-Glu-gamma-Glu spacer
  MOD_RES (16)..(16): Aminoisobutryic Acid
HXQGTFTSDKSKYLDXRRAQDFVCWLMNT

SEQ ID NO: 618 - protein, 29 aa, Artificial Sequence
  Synthetic peptide
  MISC_FEATURE: c-term amidation
  MOD_RES (2)..(2): Aminoisobutryic Acid
  MOD_RES (10)..(10): Covalently bound to C14 fatty acyl group via Ala-Ala spacer
  MOD_RES (16)..(16): Aminoisobutryic Acid
HXQGTFTSDKSKYLDXRRAQDFVCWLMNT

SEQ ID NO: 619 - protein, 29 aa, Artificial Sequence
  Synthetic peptide
  MISC_FEATURE: c-term amidation
  MOD_RES (2)..(2): Aminoisobutyric Acid
  MOD_RES (10)..(10): Covalently bound to C16 fatty acyl group via di peptide spacer
  MOD_RES (16)..(16): Aminoisobutyric Acid
HXQGTFTSDKSKYLDXRRAQDFVCWLMNT

SEQ ID NO: 620 - protein, 29 aa, Artificial Sequence
  Synthetic peptide
  MISC_FEATURE: c-term amidation
  MOD_RES (2)..(2): Aminoisobutyric Acid
  MOD_RES (10)..(10): Covelently bound to C16 fatty acyl group via Ala-Ala spacer
  MOD_RES (16)..(16): Aminoisobutyric Acid
HXQGTFTSDKSKYLDXRRAQDFVCWLMNT

SEQ ID NO: 621 - protein, 29 aa, Artificial Sequence
  Synthetic peptide
  MISC_FEATURE: c-term amidation
  MOD_RES (2)..(2): Aminoisobutyric Acid
  MOD_RES (10)..(10): Covalently bound to C16 fatty acyl group
  MOD_RES (16)..(16): Aminoisobutyric Acid
HXQGTFTSDKSKYLDXRRAQDFVCWLMNT

SEQ ID NO: 622 - protein, 30 aa, Artificial Sequence
  Synthetic peptide
  MISC_FEATURE: c-term amidation
  MOD_RES (2)..(2): Aminoisobutyric Acid
  MOD_RES (10)..(10): Covalently bound to C16 fatty acyl group
  MOD_RES (16)..(16): Aminoisobutyric Acid
HXQGTFTSDKSKYLDXRRAQDFVCWLMNTK

SEQ ID NO: 623 - protein, 29 aa, Artificial Sequence
  Synthetic peptide
  MISC_FEATURE: beta-Ala-beta-Ala - C16 Glucagon Amide
  MISC_FEATURE: c-term amidation
  MISC_FEATURE (10)..(10): Acylated with a C16 fatty acyl group via beta-Ala-beta-Ala spacer
HSQGTFTSDKSKYLDSRRAQDFVQWLMNT

SEQ ID NO: 624 - protein, 29 aa, Artificial Sequence
  Synthetic peptide
  MISC_FEATURE: Chimera-2 Aib2C24Mal40KPEG
  MOD_RES (2)..(2): Xaa is Aib
  MOD_RES (24)..(24): Covalently bound to 40kDa PEG via thioether made by reaction of peptide with a maleimide-activated PEG
  MOD_RES (29)..(29): AMIDATION
HXQGTFTSDYSKYLDEQAAKEFICWLMNT

SEQ ID NO: 625 - protein, 29 aa, Artificial Sequence
  Synthetic peptide
  MISC_FEATURE: Chimera-2 Aib2E16K20lactamC24Mal40KPEG
  MOD_RES (2)..(2): Xaa is Aib
  MISC_FEATURE (16)..(20): Lactam ring between side chains of the amino acids at positions 16 and 20
  MOD_RES (24)..(24): Covalently bound to 40kDa PEG via thioether made by reaction of peptide with a maleimide-activated PEG
  MOD_RES (29)..(29): AMIDATION
HXQGTFTSDYSKYLDEQAAKEFICWLMNT

SEQ ID NO: 626 - protein, 29 aa, Artificial Sequence
  Synthetic peptide
  MISC_FEATURE: Glucagon Aib2E16K20lactamC24amideMal40KPEG
  MOD_RES (2)..(2): Xaa is Aib
  MISC_FEATURE (16)..(20): Lactam ring between side chains of amino acids at positions 16 and 20
  MOD_RES (24)..(24): Covalently bound to 40kDa PEG via thioether made by reaction of peptide with a maleimide-activated PEG
  MOD_RES (29)..(29): AMIDATION
HXQGTFTSDYSKYLDERRAKDFVCWLMNT

SEQ ID NO: 627 - skipped

SEQ ID NO: 628 - protein, 29 aa, Artificial Sequence
  Synthetic peptide
  MISC_FEATURE: Glucagon Dmia1E16K20lactamC24Mal40KPEG
  MOD_RES (1)..(1): Xaa is Dmia
  MISC_FEATURE (16)..(20): Lactam ring between side chains of amino acids at positions 16 and 20
  MOD_RES (24)..(24): Covalently bound to 40kDa PEG via thioether made by reaction of peptide with a maleimide-activated PEG
  MOD_RES (29)..(29): AMIDATION
XSQGTFTSDYSKYLDERRAKDFVCWLMNT

SEQ ID NO: 629 - protein, 29 aa, Artificial Sequence
  Synthetic peptide
  MISC_FEATURE: Glucagon Dmia1E16K20lactamC24Mal40KPEG
  MOD_RES (1)..(1): Xaa is Dmia
  MISC_FEATURE (16)..(20): Lactam ring between side chains of amino acids at positions 16 and 20
  MISC_FEATURE (24)..(24): Covalently bound to 40kDa PEG via thioether made by reaction of peptide with a maleimide-activated PEG
XSQGTFTSDYSKYLDERRAKDFVCWLMNT

SEQ ID NO: 630 - protein, 29 aa, Artificial Sequence
  Synthetic peptide
  MISC_FEATURE: Glucagon Dmia1E16K20lactamC24thioether40KPEG
  MOD_RES (1)..(1): Xaa is Dmia
  MISC_FEATURE (16)..(20): Lactam ring between side chains of amino acids at position 16 and 20
  MOD_RES (24)..(24): Covalently bound to 40kDa PEG via thioether made by reaction of peptide with haloacetyl-activated PEG
  MOD_RES (29)..(29): AMIDATION
XSQGTFTSDYSKYLDERRAKDFVCWLMNT

SEQ ID NO: 631 - protein, 29 aa, Artificial Sequence
  Synthetic peptide
  MISC_FEATURE: Chimera2 Aib2E3C24-Thioether40K PEG(NOF)
  MOD_RES (2)..(2): Xaa is Aib
  MOD_RES (24)..(24): Covalently bound to 40kDa PEG via thioether made by reaction of peptide with haloacetyl-activated PEG
  MOD_RES (29)..(29): AMIDATION
HXEGTFTSDYSKYLDEQAAKEFICWLMNT

SEQ ID NO: 632 - protein, 29 aa, Artificial Sequence
  Synthetic peptide
  MOD_RES (1)..(1): Xaa is Dmia
  MOD_RES (24)..(24): Covalently bound to 40kDa PEG
  MOD_RES (29)..(29): AMIDATION
XSEGTFTSDYSKYLEERRAKDFVCWLMNT

SEQ ID NO: 633 - protein, 29 aa, Artificial Sequence
  Synthetic peptide
  MISC_FEATURE: Glucagon Aib2Aib16C24K10(rErE-C16) C24PEG40K amide
  MOD_RES (2)..(2): Xaa is Aib
  MOD_RES (10)..(10): Covalently bound to C14 fatty acyl group via gamma-Glu-gamma-Glu spacer
  MOD_RES (16)..(16): Xaa is Aib
  MOD_RES (24)..(24): Covalently bound to 40kDa PEG via thioether made by reaction of peptide with haloacetyl-activated PEG
  MOD_RES (29)..(29): AMIDATION
HXQGTFTSDKSKYLDXRRAQDFVCWLMNT

SEQ ID NO: 634 - protein, 29 aa, Artificial Sequence
  Synthetic peptide
  MISC_FEATURE: Glucagon Aib2Aib16K10(AA-C14)C24PEG40K TE amide
  MOD_RES (2)..(2): Xaa is Aib
  MOD_RES (10)..(10): Covalently bound to C14 fatty acyl group via Ala-Ala spacer
  MOD_RES (16)..(16): Xaa is Aib
  MOD_RES (24)..(24): Covalently bound to 40kDa PEG via thioether made by reaction of peptide with haloacetyl-activated PEG
  MOD_RES (29)..(29): AMIDATION
HXQGTFTSDKSKYLDXRRAQDFVCWLMNT

SEQ ID NO: 635 - protein, 29 aa, Artificial Sequence
  Synthetic peptide
  MISC_FEATURE: Glucagon Aib2Aib16K10(AA-C16) amide
  MOD_RES (2)..(2): Xaa is Aib
  MOD_RES (10)..(10): Covalently bound to C16 fatty acyl group via Ala-Ala spacer
  MOD_RES (16)..(16): Xaa is Aib
  MOD_RES (29)..(29): AMIDATION
HXQGTFTSDKSKYLDXRRAQDFVQWLMNT

SEQ ID NO: 636 - protein, 29 aa, Artificial Sequence
  Synthetic peptide
  MISC_FEATURE: Glucagon Aib2Aib16K10(rErE-C16) amide
  MOD_RES (2)..(2): Xaa is Aib
  MOD_RES (10)..(10): Covalently bound to C16 fatty acyl group via gamma-Glu-gamma-Glu spacer
  MOD_RES (16)..(16): Xaa is Aib
  MOD_RES (29)..(29): AMIDATION
HXQGTFTSDKSKYLDXRRAQDFVQWLMNT

SEQ ID NO: 637 - protein, 29 aa, Artificial Sequence
  Synthetic peptide
  MOD_RES (2)..(2): Xaa is Aib
  MOD_RES (16)..(16): Xaa is Aib
  MOD_RES (29)..(29): AMIDATION
HXQGTFTSDYSKYLDXRRAQDFVQWLMNT

SEQ ID NO: 638 - DNA, 20 bp, Artificial Sequence
  Synthetic primer
caaggtccagggaggttgtg

SEQ ID NO: 639 - DNA, 24 bp, Artificial Sequence
  Synthetic primer
ccaaaggtaagctgtccataagga

SEQ ID NO: 640 - DNA, 22 bp, Artificial Sequence
  Synthetic primer
ctctcccaagagtcacatgtcc

SEQ ID NO: 641 - DNA, 22 bp, Artificial Sequence
  Synthetic primer
caataactcggtcccctacaac

SEQ ID NO: 642 - protein, 29 aa, Artificial Sequence
  Synthetic peptide
HSQGTFTSDYSKYLDSRRAQDFVQWLMDT

SEQ ID NO: 643 - protein, 29 aa, Artificial Sequence
  Synthetic peptide
  MISC_FEATURE: c-term amidation
  MOD_RES (2)..(2): Xaa is d-Ser
  MOD_RES (10)..(10): Acylated with a C16 fatty acyl group via gamma-Glu spacer
HXQGTFTSDKSKYLDEQAAKEFIAWLMNT

SEQ ID NO: 644 - protein, 29 aa, Artificial Sequence
  Synthetic peptide
  MISC_FEATURE: c-term amidation
  MOD_RES (2)..(2): Xaa is d-Ser
  MOD_RES (10)..(10): Acylated with a C16 fatty acyl group via gamma-Glu-gamma-Glu spacer
HXQGTFTSDKSKYLDEQAAKEFIAWLMNT

SEQ ID NO: 645 - protein, 29 aa, Artificial Sequence
  Synthetic peptide
  MISC_FEATURE: c-term amidation
  MOD_RES (2)..(2): Xaa is Aib
  MOD_RES (10)..(10): Acylated with a C16 fatty acyl group via gamma-Glu spacer
HXQGTFTSDKSKYLDEQAAKEFIAWLMNT

SEQ ID NO: 646 - protein, 29 aa, Artificial Sequence
  Synthetic peptide
  MISC_FEATURE: c-term amidation
  MOD_RES (2)..(2): Xaa is Aib
  MOD_RES (10)..(10): Acylated with a C16 fatty acyl group via gamma-Glu-gamma-Glu spacer
HXQGTFTSDKSKYLDEQAAKEFIAWLMNT

SEQ ID NO: 647 - protein, 29 aa, Artificial Sequence
  Synthetic peptide
  MISC_FEATURE: c-term amidation
  MOD_RES (2)..(2): Xaa is Aib
  MOD_RES (10)..(10): Acylated with a C16 fatty acyl group
HXEGTFTSDKSKYLDEQAAKEFIAWLMNT

SEQ ID NO: 648 - protein, 29 aa, Artificial Sequence
  Synthetic peptide
  MISC_FEATURE: c-term amidation
  MOD_RES (2)..(2): Xaa is Aib
  MOD_RES (10)..(10): Acylated with a C16 fatty acyl group via gamma-Glu-gamma-Glu spacer
HXEGTFTSDKSKYLDEQAAKEFIAWLMNT

SEQ ID NO: 649 - protein, 29 aa, Artificial Sequence
  Synthetic peptide
  MISC_FEATURE: c-term amidation
  MOD_RES (2)..(2): Xaa is Aib
  MOD_RES (10)..(10): Acylated with a C16 fatty acyl group via gamma-Glu spacer
HXQGTFISDKSKYLDEQAAKEFIAWLMNT

SEQ ID NO: 650 - protein, 29 aa, Artificial Sequence
  Synthetic peptide
  MISC_FEATURE: c-term amidation
  MOD_RES (2)..(2): Xaa is Aib
  MOD_RES (10)..(10): Acylated with a C16 fatty acyl group via gamma-Glu-gamma-Glu spacer
HXQGTFISDKSKYLDEQAAKEFIAWLMNT

SEQ ID NO: 651 - protein, 29 aa, Artificial Sequence
  Synthetic peptide
  MISC_FEATURE: c-term amidation
  MOD_RES (1)..(1): Xaa is Dmia
  MOD_RES (10)..(10): Acylated with a C16 fatty acyl group via gamma-Glu spacer
  MISC_FEATURE (16)..(20): Lactam ring between side chains of amino acids at positions 16 and 20
XSQGTFTSDKSKYLDERRAKDFVQWLMNT

SEQ ID NO: 652 - protein, 29 aa, Artificial Sequence
  Synthetic peptide
  MISC_FEATURE: c-term amidation
  MOD_RES (1)..(1): Xaa is Dmia
  MOD_RES (10)..(10): Acylated with a C16 fatty acyl group via gamma-Glu-gamma-Glu spacer
  MISC_FEATURE (16)..(20): Lactam ring between side chains of amino acids at positions 16 and 20
XSQGTFTSDKSKYLDERRAKDFVQWLMNT

SEQ ID NO: 653 - protein, 29 aa, Artificial Sequence
  Synthetic peptide
  MISC_FEATURE: c-term amidation
  MOD_RES (1)..(1): Xaa is Dmia
  MISC_FEATURE (16)..(20): Lactam ring between side chains of amino acids at positions 16 and 20
  MOD_RES (29)..(29): Acylated with a C16 fatty acyl group via gamma-Glu spacer
XSQGTFTSDYSKYLDERRAKDFVQWLMNK

SEQ ID NO: 654 - protein, 29 aa, Artificial Sequence
  Synthetic peptide
  MISC_FEATURE: c-term amidation
  MOD_RES (1)..(1): Xaa is Dmia
  MISC_FEATURE (16)..(20): Lactam ring between side chains of amino acids at positions 16 and 20
  MOD_RES (29)..(29): Acylated with a C16 fatty acyl group via gamma-Glu-gamma-Glu spacer
XSQGTFTSDYSKYLDERRAKDFVQWLMNK

SEQ ID NO: 655 - protein, 29 aa, Artificial Sequence
  Synthetic peptide
  MISC_FEATURE: c-term amidation
  MOD_RES (2)..(2): Xaa is Aib
  MOD_RES (10)..(10): Acylated with a C16 fatty acyl group via gamma-Glu-gamma-Glu spacer
  MOD_RES (16)..(16): Xaa is Aib
HXQGTFTSDKSKYLDXRAAQDFVQWLMDT

SEQ ID NO: 656 - protein, 29 aa, Artificial Sequence
  Synthetic peptide
  MISC_FEATURE: c-term amidation
  MOD_RES (2)..(2): Xaa is Aib
  MOD_RES (10)..(10): Acylated with a C16 fatty acyl group via gamma-Glu spacer
  MOD_RES (16)..(16): Xaa is Aib
HXQGTFTSDKSKYLDXRAAQDFVQWLMDT

SEQ ID NO: 657 - protein, 29 aa, Artificial Sequence
  Synthetic peptide
  MISC_FEATURE: c-term amidation
  MOD_RES (2)..(2): Aminoisobutryic Acid
  MOD_RES (10)..(10): Acylated with a C16 fatty acyl group via dipeptide spacer
  MOD_RES (16)..(16): Aminoisobutryic Acid
HXQGTFTSDKSKYLDXRRAQDFVQWLMNT

SEQ ID NO: 658 - protein, 29 aa, Artificial Sequence
  Synthetic peptide
  MISC_FEATURE: c-term amidation
  MOD_RES (2)..(2): Aminoisobutyric Acid
  MOD_RES (10)..(10): Acylated with a C14 fatty acyl group via dipeptide spacer
  MOD_RES (16)..(16): Aminoisobutyric Acid
  MOD_RES (24)..(24): Pegylated
HXQGTFTSDKSKYLDXRRAQDFVCWLMNT

SEQ ID NO: 659 - protein, 29 aa, Artificial Sequence
  Synthetic peptide
  MISC_FEATURE: c-term amidation
  MOD_RES (2)..(2): Aminoisobutryic Acid
  MOD_RES (10)..(10): Acylated with a C14 fatty acyl group via dipeptide spacer
  MOD_RES (16)..(16): Aminoisobutryic Acid
HXQGTFTSDKSKYLDXRRAQDFVQWLMNT

SEQ ID NO: 660 - protein, 29 aa, Artificial Sequence
  Synthetic peptide
  MISC_FEATURE: c-term amidation
  MOD_RES (2)..(2): Aminoisobutryic Acid
  MOD_RES (10)..(10): Acylated with a C16 fatty acyl group via dipeptide spacer
  MOD_RES (16)..(16): Aminoisobutryic Acid
  MOD_RES (24)..(24): Pegylated
HXQGTFTSDKSKYLDXRRAQDFVCWLMNT

SEQ ID NO: 661 - protein, 29 aa, Artificial Sequence
  Synthetic peptide
  MISC_FEATURE: c-term amidation
  MOD_RES (10)..(10): Acylated with a C16 fatty acyl group via dipeptide spacer
HSQGTFTSDKSKYLDSRRAQDFVQWLMNT

SEQ ID NO: 662 - protein, 30 aa, Artificial Sequence; identical to SEQ ID NO: 581
  Synthetic peptide
  MISC_FEATURE: Peptide dS2E16K20K30-C14 Gluc Amide
  MISC_FEATURE: c-term amidation
  MOD_RES (2)..(2): D-serine, D-alanine, valine, amino n-butyric acid, glycine, N-methyl serine, aminoisobutyric acid
  MOD_RES (30)..(30): Acylated with a C14 fatty acyl group

SEQ ID NO: 663 - protein, 29 aa, Artificial Sequence
  Synthetic peptide
  MISC_FEATURE: Peptide dS2K10(C14)E16K20-Gluc Amide
  MISC_FEATURE: c-term amidation
  MOD_RES (2)..(2): D-serine, D-alanine, valine, amino n-butyric acid, glycine, N-methyl serine, aminoisobutyric acid
  MOD_RES (10)..(10): Acylated with a C14 fatty acyl group
HXQGTFTSDKSKYLDERRAKDFVQWLMNT

SEQ ID NO: 664 - protein, 30 aa, Artificial Sequence; identical to SEQ ID NO: 581
  Synthetic peptide
  MISC_FEATURE: Peptide dS2E16K20K30-C16 Gluc Amide
  MISC_FEATURE: c-term amidation
  MOD_RES (2)..(2): D-serine, D-alanine, valine, amino n-butyric acid, glycine, N-methyl serine, aminoisobutyric acid
  MOD_RES (30)..(30): Acylated with a C16 fatty acyl group

SEQ ID NO: 665 - protein, 29 aa, Artificial Sequence
  Synthetic peptide
  MISC_FEATURE: Peptide dS2K10(C16)E16K20-Gluc Amide
  MISC_FEATURE: c-term amidation
  MOD_RES (2)..(2): D-serine, D-alanine, valine, amino n-butyric acid, glycine, N-methyl serine, aminoisobutyric acid
  MOD_RES (10)..(10): Acylated with a C16 fatty acyl group
HXQGTFTSDKSKYLDERRAKDFVQWLMNT

SEQ ID NO: 666 - protein, 29 aa, Artificial Sequence
  Synthetic peptide
  MISC_FEATURE: c-term amidation
  MOD_RES (2)..(2): D-serine, D-alanine, valine, amino n-butyric acid, glycine, N-methyl serine, aminoisobutyric acid
  MOD_RES (10)..(10): Covalently bound to C14 fatty acyl group
HXQGTFTSDKSKYLDERRAKDFVQWLMNT

SEQ ID NO: 667 - protein, 29 aa, Artificial Sequence
  Synthetic peptide
  MISC_FEATURE: c-term amidation
  MOD_RES (2)..(2): D-serine, D-alanine, valine, amino n-butyric acid, glycine, N-methyl serine, aminoisobutyric acid
  MOD_RES (10)..(10): Covalently bound to C16 fatty acyl group
HXQGTFTSDKSKYLDERRAKDFVQWLMNT

SEQ ID NO: 668 - protein, 29 aa, Artificial Sequence
  Synthetic peptide
  MISC_FEATURE: c-term amidation
  MOD_RES (2)..(2): D-serine, D-alanine, valine, amino n-butyric acid, glycine, N-methyl serine, aminoisobutyric acid
  MOD_RES (10)..(10): Covalently bound to a C18 fatty acyl group
HXQGTFTSDKSKYLDERRAKDFVQWLMNT

SEQ ID NO: 669 - protein, 29 aa, Artificial Sequence
  Synthetic peptide
  MISC_FEATURE: c-term amidation
  MOD_RES (2)..(2): Aminoisobutryic Acid
  MOD_RES (10)..(10): Covalently bound to C14 fatty acyl group via dipeptide spacer
  MOD_RES (16)..(16): Aminoisobutryic Acid
HXQGTFTSDKSKYLDXRRAQDFVCWLMNT

SEQ ID NO: 670 - protein, 29 aa, Artificial Sequence
  Synthetic peptide
  MISC_FEATURE: Glucagon Aib2Aib16C24K10(rErE-C16) C24PEG40K amide
  MOD_RES (2)..(2): Xaa is Aib
  MOD_RES (10)..(10): Covalently bound to C14 fatty acyl group via dipeptide spacer
  MOD_RES (16)..(16): Xaa is Aib
  MOD_RES (24)..(24): Covalently bound to 40kDa PEG via thioether made by reaction of peptide with haloacetyl-activated PEG
  MOD_RES (29)..(29): AMIDATION
HXQGTFTSDKSKYLDXRRAQDFVCWLMNT

SEQ ID NO: 671 - protein, 29 aa, Artificial Sequence
  Synthetic peptide
  MISC_FEATURE: Glucagon Aib2Aib16K10(rErE-C16) amide
  MOD_RES (2)..(2): Xaa is Aib
  MOD_RES (10)..(10): Covalently bound to C16 fatty acyl group via dipeptide spacer
  MOD_RES (16)..(16): Xaa is Aib
  MOD_RES (29)..(29): AMIDATION
HXQGTFTSDKSKYLDXRRAQDFVQWLMNT

SEQ ID NO: 672 - protein, 29 aa, Artificial Sequence
  Synthetic peptide
  MISC_FEATURE: c-term amidation
  MOD_RES (2)..(2): D-serine, D-alanine, valine, amino n-butyric acid, glycine, N-methyl serine, aminoisobutyric acid
  MOD_RES (10)..(10): Acylated with a C16 fatty acyl group via acidic amino acid spacer
HXQGTFTSDKSKYLDEQAAKEFIAWLMNT

SEQ ID NO: 673 - protein, 29 aa, Artificial Sequence
  Synthetic peptide
  MISC_FEATURE: c-term amidation
  MOD_RES (2)..(2): D-serine, D-alanine, valine, amino n-butyric acid, glycine, N-methyl serine, aminoisobutyric acid
  MOD_RES (10)..(10): Acylated with a C16 fatty acyl group via dipeptide spacer
HXQGTFTSDKSKYLDEQAAKEFIAWLMNT

SEQ ID NO: 674 - protein, 29 aa, Artificial Sequence
  Synthetic peptide
  MISC_FEATURE: c-term amidation
  MOD_RES (2)..(2): Xaa is Aib
  MOD_RES (10)..(10): Acylated with a C16 fatty acyl group via acidic amino acid spacer
HXQGTFTSDKSKYLDEQAAKEFIAWLMNT

SEQ ID NO: 675 - protein, 29 aa, Artificial Sequence
  Synthetic peptide
  MISC_FEATURE: c-term amidation
  MOD_RES (2)..(2): Xaa is Aib
  MOD_RES (10)..(10): Acylated with a C16 fatty acyl group via dipeptide spacer
HXQGTFTSDKSKYLDEQAAKEFIAWLMNT

SEQ ID NO: 676 - protein, 29 aa, Artificial Sequence
  Synthetic peptide
  MISC_FEATURE: c-term amidation
  MOD_RES (2)..(2): Xaa is Aib
  MOD_RES (10)..(10): Acylated with a C16 fatty acyl group via dipeptide spacer
HXEGTFTSDKSKYLDEQAAKEFIAWLMNT

SEQ ID NO: 677 - protein, 29 aa, Artificial Sequence
  Synthetic peptide
  MISC_FEATURE: c-term amidation
  MOD_RES (2)..(2): Xaa is Aib
  MOD_RES (10)..(10): Acylated with a C16 fatty acyl group via acidic amino acid spacer
HXQGTFISDKSKYLDEQAAKEFIAWLMNT

SEQ ID NO: 678 - protein, 29 aa, Artificial Sequence
  Synthetic peptide
  MISC_FEATURE: c-term amidation
  MOD_RES (2)..(2): Xaa is Aib
  MOD_RES (10)..(10): Acylated with a C16 fatty acyl group via dipeptide spacer
HXQGTFISDKSKYLDEQAAKEFIAWLMNT

SEQ ID NO: 679 - protein, 29 aa, Artificial Sequence
  Synthetic peptide
  MISC_FEATURE: c-term amidation
  MOD_RES (1)..(1): Xaa is Dmia
  MOD_RES (10)..(10): Acylated with a C16 fatty acyl group via acidic amino acid spacer
  MISC_FEATURE (16)..(20): Lactam ring between side chains of amino acids at positions 16 and 20
XSQGTFTSDKSKYLDERRAKDFVQWLMNT

SEQ ID NO: 680 - protein, 29 aa, Artificial Sequence
  Synthetic peptide
  MISC_FEATURE: c-term amidation
  MOD_RES (1)..(1): Xaa is Dmia
  MOD_RES (10)..(10): Acylated with a C16 fatty acyl group via dipeptide spacer
  MISC_FEATURE (16)..(20): Lactam ring between side chains of amino acids at positions 16 and 20
XSQGTFTSDKSKYLDERRAKDFVQWLMNT

SEQ ID NO: 681 - protein, 29 aa, Artificial Sequence
  Synthetic peptide
  MISC_FEATURE: c-term amidation
  MOD_RES (1)..(1): Xaa is Dmia
  MISC_FEATURE (16)..(20): Lactam ring between side chains of amino acids at positions 16 and 20
  MOD_RES (29)..(29): Acylated with a C16 fatty acyl group via acidic amino acid spacer
XSQGTFTSDYSKYLDERRAKDFVQWLMNK

SEQ ID NO: 682 - protein, 29 aa, Artificial Sequence
  Synthetic peptide
  MISC_FEATURE: c-term amidation
  MOD_RES (1)..(1): Xaa is Dmia
  MISC_FEATURE (16)..(20): Lactam ring between side chains of amino acids at positions 16 and 20
  MOD_RES (29)..(29): Acylated with a C16 fatty acyl group via dipeptide spacer
XSQGTFTSDYSKYLDERRAKDFVQWLMNK

SEQ ID NO: 683 - protein, 29 aa, Artificial Sequence
  Synthetic peptide
  MISC_FEATURE: c-term amidation
  MOD_RES (2)..(2): Xaa is Aib
  MOD_RES (10)..(10): Acylated with a C16 fatty acyl group via dipeptide spacer
  MOD_RES (16)..(16): Xaa is Aib
HXQGTFTSDKSKYLDXRAAQDFVQWLMDT

SEQ ID NO: 684 - protein, 29 aa, Artificial Sequence
  Synthetic peptide
  MISC_FEATURE: c-term amidation
  MOD_RES (2)..(2): Xaa is Aib
  MOD_RES (10)..(10): Acylated with a C16 fatty acyl group via acidic amino acid spacer
  MOD_RES (16)..(16): Xaa is Aib
HXQGTFTSDKSKYLDXRAAQDFVQWLMDT

SEQ ID NO: 685 - protein, 29 aa, Artificial Sequence
  Synthetic Polypeptide
  MISC_FEATURE: c-term amidation
  MOD_RES (1)..(1): (Des-amino)His
  MISC_FEATURE (12)..(16): Lactam ring between side chains at positions 12 and 16
XSQGTFTSDYSKYLDERRAQDFVQWLMNT

SEQ ID NO: 686 - protein, 29 aa, Artificial Sequence
  Synthetic Polypeptide
  MISC_FEATURE: c-term amidation
  MOD_RES (1)..(1): (Des-amino)His
  MISC_FEATURE (12)..(16): Lactam ring between side chains at positions 12 and 16
XSQGTFTSDYSKYLDERRAKDFVQWLMNT

SEQ ID NO: 687 - protein, 29 aa, Artificial Sequence
  Synthetic Polypeptide
  MISC_FEATURE: c-term amidation
  MOD_RES (1)..(1): (Des-amino)His
  MISC_FEATURE (16)..(20): Lactam ring between side chains at positions 16 and 20
XSQGTFTSDYSKYLDKRRAEDFVQWLMNT

SEQ ID NO: 688 - protein, 29 aa, Artificial Sequence
  Synthetic Polypeptide
  MOD_RES (1)..(1): (Des-amino)His
  MISC_FEATURE (29)..(29): c-term amidation
XSQGTFTSDYSKYLDERAAKDFVQWLMNT

SEQ ID NO: 689 - protein, 29 aa, Artificial Sequence
  Synthetic Polypeptide
  MISC_FEATURE: c-term amidation
  MOD_RES (1)..(1): (Des-amino)His
  MISC_FEATURE (16)..(20): Lactam ring between side chains at positions 16 and 20
XSQGTFTSDYSKYLDERAAKDFVQWLMNT

SEQ ID NO: 690 - protein, 29 aa, Artificial Sequence
  Synthetic Polypeptide
  MISC_FEATURE: c-term amidation
  MOD_RES (1)..(1): (Des-amino)His
  MISC_FEATURE (12)..(16): Lactam ring between side chains at positions 12 and 16
XSQGTFTSDYSKYLDERAAQDFVQWLMNT

SEQ ID NO: 691 - protein, 29 aa, Artificial Sequence
  Synthetic Polypeptide
  MISC_FEATURE: c-term amidation
  MOD_RES (1)..(1): (Des-amino)His
  MISC_FEATURE (12)..(16): Lactam ring between side chains at positions 12 and 16
XSQGTFTSDYSKYLDERAAKDFVQWLMNT

SEQ ID NO: 692 - protein, 29 aa, Artificial Sequence
  Synthetic Polypeptide
  MISC_FEATURE: c-term amidation
  MOD_RES (1)..(1): (Des-amino)His
  MISC_FEATURE (16)..(20): Lactam ring between side chains at positions 16 and 20
XSQGTFTSDYSKYLDKRAAEDFVQWLMNT

SEQ ID NO: 693 - protein, 29 aa, Artificial Sequence
  Synthetic Polypeptide
  MISC_FEATURE: c-term amidation
  MOD_RES (1)..(1): (Des-amino)His
  MISC_FEATURE (12)..(16): Lactam ring between side chains at positions 12 and 16
XSQGTFTSDYSKYLDEQAAKEFIAWLMNT

SEQ ID NO: 694-698 - skipped (5 entries)

SEQ ID NO: 699 - protein, 29 aa, Artificial Sequence
  Glucagon analog
  MOD_RES (29)..(29): C-terminal amidation
HSQGTFTSDYSKYLDERRAQDFVQWLMNT

SEQ ID NO: 700 - protein, 31 aa, Artificial Sequence
  GLP-1 analog
HAEGTFTSDVSSYLEEQAAREFIAWLVRGRG

SEQ ID NO: 701 - protein, 29 aa, Homo sapiens
  MOD_RES (29)..(29): C-terminal amidation
HSQGTFTSDYSKYLDSRRAQDFVQWLMNT

SEQ ID NO: 702 - protein, 24 aa, Artificial Sequence
  Glucagon analog
  MOD_RES (1)..(1): N-terminal amino group replaced with hydroxy group
FTSDYSKYLDSRRAQDFVQWLMNT

SEQ ID NO: 703 - protein, 31 aa, Homo sapiens
HAEGTFTSDVSSYLEGQAAKEFIAWLVKGRG

SEQ ID NO: 704 - protein, 30 aa, Homo sapiens
  MOD_RES (30)..(30): AMIDATION
HAEGTFTSDVSSYLEGQAAKEFIAWLVKGR

SEQ ID NO: 705 - protein, 28 aa, Homo sapiens
HGEGTFTSDLSKQMEEAVRLFIEWLKNG

SEQ ID NO: 706 - protein, 37 aa, Homo sapiens
HSQGTFTSDYSKYLDSRRAQDFVQWLMDTKRNRNNIA

SEQ ID NO: 707 - protein, 42 aa, Homo sapiens
YAEGTFISDYSIAMDKIHQQDFVNWLLAQKGKKNDWKHNITQ

SEQ ID NO: 708 - protein, 33 aa, Homo sapiens
HADGSFSDEMNTILDNLAARDFINWLIQTKITD

SEQ ID NO: 709 - protein, 49 aa, Homo sapiens
YLYQWLGAPVPYPDPLEPRREVCELNPDCDELADHIGFQEAYRRFYGPV

SEQ ID NO: 710 - protein, 10 aa, Artificial Sequence
  peptide fragment representing the carboxy terminal 10 amino acids of Exendin-4
GPSSGAPPPS

SEQ ID NO: 711 - protein, 10 aa, Artificial Sequence
  peptide fragment representing the carboxy terminal 10 amino acids of Exendin-4
  MOD_RES (10)..(10): AMIDATION
GPSSGAPPPS

SEQ ID NO: 712 - protein, 11 aa, Artificial Sequence
  peptide fragment representing the carboxy terminal 10 amino acids of Exendin-4
  MOD_RES (11)..(11): Pegylation
GPSSGAPPPSC

SEQ ID NO: 713 - protein, 13 aa, Artificial Sequence
  peptide fragment representing the carboxy terminal 13 amino acids of GIP peptide
KGKKNDWKHNITQ

SEQ ID NO: 714 - protein, 8 aa, Artificial Sequence
  peptide fragment representing the carboxy terminal 8 amino acids of oxyntomodulin
KRNRNNIA

SEQ ID NO: 715 - protein, 6 aa, Artificial Sequence
  Glucagon analogue
  MOD_RES (6)..(6): C-terminal amide
HTRGTF

SEQ ID NO: 716 - protein, 6 aa, Artificial Sequence
  glucagon analogue
  MOD_RES (1)..(1): d-histidine
  MOD_RES (2)..(2): d-threonine
  MOD_RES (3)..(3): d-arginine
  MOD_RES (5)..(5): d-threonine
  MOD_RES (6)..(6): d-phenylalanine
  MOD_RES (6)..(6): C-terminal amidation
XXXGXX

SEQ ID NO: 717 - protein, 30 aa, Artificial Sequence
  glucagon analogue
  MOD_RES (24)..(24): pegylation
HAEGTFTSDVSSYLEGQAAKEFICWLVKGR

SEQ ID NO: 718 - protein, 39 aa, Heloderma suspectum
HGEGTFTSDLSKQMEEEAVRLFIEWLKNGGPSSGAPPPS

SEQ ID NO: 719 - protein, 29 aa, Homo sapiens
YADAIFTNSYRKVLGQLSARKLLQDIMSR

SEQ ID NO: 720 - protein, 28 aa, Homo sapiens
  MOD_RES (28)..(28): AMIDATION
HSDAVFTDNYTRLRKQMAVKKYLNSILN

SEQ ID NO: 721 - protein, 27 aa, Homo sapiens
HSDGIFTDSYSRYRKQMAVKKYLAAVL

SEQ ID NO: 722 - protein, 27 aa, Homo sapiens
  MOD_RES (27)..(27): AMIDATION
HADGVFTSDFSKLLGQLSAKKYLESLM

SEQ ID NO: 723 - protein, 27 aa, Homo sapiens
  MOD_RES (27)..(27): AMIDATION
HSDGTFTSELSRLREGARLQRLLQGLV

SEQ ID NO: 724 - protein, 30 aa, Artificial Sequence
  Synthetic peptide
  MOD_RES (2)..(2): Xaa is AIB
  MOD_RES (24)..(24): Cys residue linked to 40kDa PEG via maleimide
  MOD_RES (30)..(30): C-terminal amidation
HXQGTFTSDYSKYLDEQAAKEFICWLMNTN

SEQ ID NO: 725 - protein, 29 aa, Artificial Sequence
  Synthetic peptide
  MOD_RES (2)..(2): Xaa is AIB
  MISC_FEATURE (24)..(24): Covalently bound to 40K PEG via thioether
  MOD_RES (29)..(29): AMIDATION
HXEGTFTSDYSKYLDEQAAKEFICWLMNT

SEQ ID NO: 726 - protein, 31 aa, Artificial Sequence
  Synthetic peptide
  MOD_RES (1)..(1): d-lysine
  MOD_RES (2)..(2): Sarcosine (N-methyl glycine)
  MOD_RES (4)..(4): Xaa is AIB
  MOD_RES (24)..(24): Covalently bound to 40kDa PEG via thioether
  MOD_RES (31)..(31): AMIDATION
KGHXEGTFTSDYSKYLDEQAAKEFICWLMNT

SEQ ID NO: 727 - protein, 31 aa, Artificial Sequence; identical to SEQ ID NO: 726
  Synthetic peptide
  MOD_RES (1)..(1): d-lysine
  MOD_RES (2)..(2): N-hexyl-glycine
  MOD_RES (4)..(4): Xaa is AIB
  MOD_RES (24)..(24): Covalently bound to 40kDa PEG via maleimide
  MOD_RES (31)..(31): AMIDATION

SEQ ID NO: 728 - protein, 31 aa, Artificial Sequence
  Synthetic peptide
  MOD_RES (1)..(1): d-lysine
  MOD_RES (2)..(2): N-methyl phenylalanine
  MOD_RES (4)..(4): Xaa is AIB
  MOD_RES (24)..(24): Covalently bound to 40kDa PEG via thioether
  MOD_RES (31)..(31): AMIDATION
KFHXEGTFTSDYSKYLDEQAAKEFICWLMNT

SEQ ID NO: 729 - protein, 29 aa, Artificial Sequence
  Synthetic peptide
  MOD_RES (2)..(2): Xaa is AIB
  MOD_RES (24)..(24): Covalently bound to 40 kDa PEG via maleimide
HXEGTFTSDYSKYLDEQAAKEFICWLMNT

SEQ ID NO: 730 - protein, 29 aa, Artificial Sequence
  Synthetic peptide
  MOD_RES (1)..(1): Xaa is DMIA
  MISC_FEATURE (16)..(20): Lactam ring between side chains of amino acids
  MOD_RES (24)..(24): Covalently bound to 40kDa PEG via maleimide
  MOD_RES (29)..(29): C-terminal amidation
XSQGTFTSDKSKYLDERRAKDFVCWLMNT

SEQ ID NO: 731 - protein, 30 aa, Artificial Sequence
  Synthetic peptide
  MOD_RES (30)..(30): C-terminal amidation
HSQGTFTSDYSKYLDEQAAKEFIAWLMNTN

SEQ ID NO: 732 - protein, 8 aa, Artificial Sequence
  Synthetic peptide
  MOD_RES (1)..(1): Xaa is Phe, hydroxyl-Phe, Gly, hydroxyl-Gly, Ala, Cys, Ser, Lys, Glu, dehydro-Val, Pro, d-Pro, AIB, 1-aminocyclohexanecarboxylic acid, 1-aminocyclopropanecarboxylic acid, N-Me-AIB, alpha-alpha-diethyl-Gly, hydroxyl-AIB, or d-Lys
  MOD_RES (2)..(2): Xaa is Pro, d-Pro, N-methyl-Gly, N-hexyl-Gly, Azetidine-2-carboxylic acid, N-methyl-Ala, or N-methyl-Phe
  MOD_RES (3)..(3): Xaa is His, d-His, Ala, or N-methyl-His
  MOD_RES (8)..(8): C-terminal amidation
XXXSRGTF

SEQ ID NO: 733 - protein, 31 aa, Artificial Sequence
  Synthetic peptide
  MOD_RES (1)..(1): d-Lys
  MOD_RES (2)..(2): Xaa is Sar
  MOD_RES (4)..(4): Xaa is AIB
  MOD_RES (26)..(26): Covalently bound to PEG via 40kDa maleimide
KXHXEGTFTSDYSKYLDEQAAKEFICWLMNT

SEQ ID NO: 734 - protein, 32 aa, Artificial Sequence
  Synthetic peptide
  MOD_RES (1)..(1): d-Lys
  MOD_RES (2)..(2): Xaa is Sar
  MOD_RES (4)..(4): Xaa is AIB
  MOD_RES (26)..(26): Cys residue linked to 40kDa PEG via maleimide
  MOD_RES (32)..(32): C-terminal amidation
KXHXQGTFTSDYSKYLDEQAAKEFICWLMNTN

SEQ ID NO: 735 - protein, 31 aa, Artificial Sequence
  Synthetic peptide
  MOD_RES (1)..(1): d-Lys
  MOD_RES (2)..(2): Xaa is Sar
  MOD_RES (3)..(3): Xaa is DMIA
  MISC_FEATURE (18)..(22): Lactam ring between side chains of amino acids
  MOD_RES (26)..(26): Covalently bound to 40kDa PEG via maleimide
  MOD_RES (31)..(31): C-terminal amidation
KXXSQGTFTSDKSKYLDERRAKDFVCWLMNT

SEQ ID NO: 736 - protein, 31 aa, Artificial Sequence; identical to SEQ ID NO: 726
  Synthetic peptide
  MOD_RES (1)..(1): d-Lys
  MOD_RES (2)..(2): N-hexyl-Gly
  MOD_RES (4)..(4): Xaa is AIB
  MISC_FEATURE (26)..(26): Covalently bound to 40K PEG via thioether
  MOD_RES (31)..(31): AMIDATION

SEQ ID NO: 737 - protein, 32 aa, Artificial Sequence
  Synthetic peptide
  MOD_RES (1)..(1): d-Lys
  MOD_RES (2)..(2): N-hexyl-Gly
  MOD_RES (4)..(4): Xaa is AIB
  MOD_RES (26)..(26): Cys residue linked to 40kDa PEG via maleimide
  MOD_RES (32)..(32): C-terminal amidation
KGHXQGTFTSDYSKYLDEQAAKEFICWLMNTN

SEQ ID NO: 738 - protein, 31 aa, Artificial Sequence
  Synthetic peptide
  MOD_RES (1)..(1): d-Lys
  MOD_RES (2)..(2): N-hexyl-Gly
  MOD_RES (3)..(3): Xaa is DMIA
  MISC_FEATURE (18)..(22): Lactam ring between side chains of amino acids
  MOD_RES (26)..(26): Covalently bound to 40kDa PEG via maleimide
  MOD_RES (31)..(31): C-terminal amidation
KGXSQGTFTSDKSKYLDERRAKDFVCWLMNT

SEQ ID NO: 739 - protein, 31 aa, Artificial Sequence; identical to SEQ ID NO: 728
  Synthetic peptide
  MOD_RES (1)..(1): d-Lys
  MOD_RES (2)..(2): N-methyl-Phe
  MOD_RES (4)..(4): Xaa is AIB
  MOD_RES (26)..(26): Covalently bound to 40kDa PEG via maleimide

SEQ ID NO: 740 - protein, 32 aa, Artificial Sequence
  Synthetic peptide
  MOD_RES (1)..(1): d-Lys
  MOD_RES (2)..(2): N-methyl-Phe
  MOD_RES (4)..(4): Xaa is AIB
  MOD_RES (26)..(26): Cys residue linked to 40kDa PEG via maleimide
  MOD_RES (32)..(32): C-terminal amidation
KFHXQGTFTSDYSKYLDEQAAKEFICWLMNTN

SEQ ID NO: 741 - protein, 31 aa, Artificial Sequence
  Synthetic peptide
  MOD_RES (1)..(1): d-Lys
  MOD_RES (2)..(2): N-methyl-Phe
  MOD_RES (3)..(3): Xaa is DMIA
  MISC_FEATURE (18)..(22): Lactam ring between side chains of amino acids
  MOD_RES (26)..(26): Covalently bound to 40kDa PEG via maleimide
  MOD_RES (31)..(31): C-terminal amidation
KFXSQGTFTSDKSKYLDERRAKDFVCWLMNT

SEQ ID NO: 742 - protein, 29 aa, Artificial Sequence
  Synthetic peptide
  MOD_RES (2)..(2): Xaa is AIB
  MOD_RES (24)..(24): Pegylated
  MOD_RES (29)..(29): C-terminal amidation
HXEGTFTSDYSKYLDEQAAKEFICWLMNT

SEQ ID NO: 743 - protein, 29 aa, Artificial Sequence
  Synthetic peptide
  MOD_RES (2)..(2): Xaa is AIB
  MOD_RES (10)..(10): Acylated with fatty acyl group
  MOD_RES (16)..(16): Xaa is AIB
  MOD_RES (29)..(29): C-terminal amidation
HXQGTFTSDKSKYLDXRAAQDFVQWLMDT

SEQ ID NO: 744 - protein, 40 aa, Artificial Sequence
  Synthetic peptide
  MOD_RES (2)..(2): Xaa is AIB
  MOD_RES (40)..(40): C-terminal amidation
HXEGTFTSDVSSYLEEQAAKEFIAWLVKGGPSSGAPPPSK

SEQ ID NO: 745 - protein, 29 aa, Artificial Sequence
  Synthetic peptide
  MOD_RES (1)..(1): Xaa is Dmia
  MISC_FEATURE (16)..(20): Lactam ring between side chains of amino acids at positions 16 and 20
  MOD_RES (24)..(24): Pegylated
  MOD_RES (29)..(29): C-terminal amidation
XSQGTFTSDYSKYLDERRAKDFVCWLMNT

SEQ ID NO: 746 - protein, 29 aa, Artificial Sequence
  Synthetic peptide
  MOD_RES (2)..(2): d-Ser
  MISC_FEATURE (16)..(20): Lactam ring between side chains of amino acids at positions 16 and 20
  MOD_RES (24)..(24): Pegylated
  MOD_RES (29)..(29): C-terminal amidation
HSQGTFTSDYSLYLDERAAKDFVCWLLDT

SEQ ID NO: 747 - protein, 29 aa, Artificial Sequence
  Synthetic peptide
  MOD_RES (2)..(2): Xaa is AIB
  MOD_RES (16)..(16): Xaa is AIB
  MOD_RES (20)..(20): Xaa is AIB
  MOD_RES (24)..(24): Pegylated
  MOD_RES (29)..(29): C-terminal amidation
HXQGTFTSDYSKYLDXKRAXEFVCWLLDT

SEQ ID NO: 748 - protein, 29 aa, Artificial Sequence
  Synthetic peptide
  MOD_RES (2)..(2): Xaa is AIB
  MOD_RES (10)..(10): Acylated with fatty acyl group via dipeptide spacer
  MOD_RES (16)..(16): Xaa is AIB
  MOD_RES (29)..(29): C-terminal amidation
HXQGTFTSDKSKYLDXRAAQDFVQWLMDT

SEQ ID NO: 749 - protein, 29 aa, Artificial Sequence
  Synthetic peptide
  MOD_RES (2)..(2): Xaa is AIB
  MOD_RES (10)..(10): Acylated with fatty acyl group via acidic amino acid spacer
  MOD_RES (16)..(16): Xaa is AIB
  MOD_RES (29)..(29): C-terminal amidation
HXQGTFTSDKSKYLDXRAAQDFVQWLMDT

SEQ ID NO: 750 - protein, 29 aa, Artificial Sequence
  Synthetic peptide
  MOD_RES (2)..(2): d-Ser
  MOD_RES (10)..(10): Acylated with fatty acyl group via dipeptide spacer
  MOD_RES (16)..(16): Xaa is AIB
  MOD_RES (29)..(29): C-terminal amidation
HSQGTFTSDKSKYLDXRAAQDFVQWLMDT

SEQ ID NO: 751 - protein, 29 aa, Artificial Sequence
  Synthetic peptide
  MOD_RES (2)..(2): Xaa is AIB
  MOD_RES (10)..(10): Acylated with fatty acyl group via dipeptide spacer
  MOD_RES (16)..(16): Xaa is AIB
  MOD_RES (29)..(29): C-terminal amidation
HXQGTFTSDKSKYLDXRAAQDFVQWLLDT

SEQ ID NO: 752 - protein, 29 aa, Artificial Sequence
  Synthetic peptide
  MOD_RES (2)..(2): Xaa is AIB
  MOD_RES (10)..(10): Acylated with fatty acyl group via dipeptide spacer
  MOD_RES (29)..(29): C-terminal amidation
HXQGTFTSDKSKYLDERAAQDFVQWLMDT

SEQ ID NO: 753 - protein, 29 aa, Artificial Sequence
  Synthetic peptide
  MOD_RES (2)..(2): Xaa is AIB
  MOD_RES (10)..(10): Acylated with fatty acyl group via dipeptide spacer
  MOD_RES (16)..(16): Xaa is AIB
  MOD_RES (29)..(29): C-terminal amidation
HXQGTFTSDKSKYLEXRAAQDFVQWLMDT

SEQ ID NO: 754 - protein, 29 aa, Artificial Sequence
  Synthetic peptide
  MOD_RES (2)..(2): d-Ser
  MOD_RES (10)..(10): Acylated with fatty acyl group via acidic amino acid spacer
  MOD_RES (29)..(29): C-terminal amidation
HSQGTFTSDKSKYLDERAAQDFVQWLLDT

SEQ ID NO: 755 - protein, 29 aa, Artificial Sequence
  Synthetic peptide
  MOD_RES (2)..(2): Xaa is AIB
  MOD_RES (10)..(10): Acylated with fatty acyl group via acidic amino acid spacer
  MOD_RES (29)..(29): C-terminal amidation
HXQGTFTSDKSKYLDEQAAKEFIAWLLDT

SEQ ID NO: 756 - protein, 40 aa, Artificial Sequence
  Synthetic polypeptide
  MOD_RES (2)..(2): Xaa is Aib
  MOD_RES (20)..(20): Xaa is Aib
  MOD_RES (40)..(40): C-terminal amidation
YXEGTFTSDYSIYLDKQAAXEFVNWLLAGGPSSGAPPPSK

SEQ ID NO: 757 - protein, 39 aa, Artificial Sequence
  Synthetic polypeptide
  MOD_RES (2)..(2): Xaa is Aib
  MOD_RES (20)..(20): Xaa is Aib
  MOD_RES (39)..(39): C-terminal amidation
YXEGTFTSDYSIYLDKQAAXEFVNWLLAGGPSSGAPPPS

SEQ ID NO: 758 - protein, 39 aa, Artificial Sequence
  Synthetic polypeptide
  MOD_RES (2)..(2): Xaa is Aib
  MOD_RES (10)..(10): Acylated with fatty acyl group via dipeptide spacer
  MOD_RES (20)..(20): Xaa is AIB
  MOD_RES (39)..(39): C-terminal amidation
YXEGTFTSDKSIYLDKQAAXEFVNWLLAGGPSSGAPPPS

SEQ ID NO: 759 - protein, 40 aa, Artificial Sequence
  Synthetic polypeptide
  MOD_RES (2)..(2): Xaa is AIB
  MOD_RES (20)..(20): Xaa is AIB
  MOD_RES (24)..(24): Pegylated
  MOD_RES (40)..(40): C-terminal amidation
YXEGTFTSDYSIYLDKQAAXEFVCWLLAGGPSSGAPPPSK

SEQ ID NO: 760 - protein, 40 aa, Artificial Sequence
  Synthetic polypeptide
  MOD_RES (2)..(2): Xaa is AIB
  MOD_RES (20)..(20): Xaa is AIB
  MOD_RES (40)..(40): Pegylated
  MOD_RES (40)..(40): C-terminal amidation
YXEGTFTSDYSIYLDKQAAXEFVNWLLAGGPSSGAPPPSC

SEQ ID NO: 761 - protein, 40 aa, Artificial sequence
  Synthetic polypeptide
  MOD_RES (2)..(2): Xaa is AIB
  MISC_FEATURE (16)..(20): Lactam bridge between side chains of amino acids at positions 16 and 20
  MOD_RES (40)..(40): Pegylated
  MOD_RES (40)..(40): C-terminal amidation
YXEGTFTSDYSIYLDEQAAKEFVNWLLAGGPSSGAPPPSC

SEQ ID NO: 762 - protein, 40 aa, Artificial Sequence; identical to SEQ ID NO: 760
  Synthetic polypeptide
  MOD_RES (2)..(2): Xaa is AIB
  MOD_RES (20)..(20): Xaa is AIB
  MOD_RES (40)..(40): Pegylated
  MOD_RES (40)..(40): C-terminal amidation

SEQ ID NO: 763 - protein, 40 aa, Artificial Sequence; identical to SEQ ID NO: 759
  Synthetic polypeptide
  MOD_RES (2)..(2): Xaa is AIB
  MOD_RES (20)..(20): Xaa is AIB
  MOD_RES (24)..(24): Pegylated
  MOD_RES (40)..(40): C-terminal amidation

SEQ ID NO: 764 - protein, 40 aa, Artificial Sequence; identical to SEQ ID NO: 756
  Synthetic polypeptide
  MOD_RES (2)..(2): Xaa is AIB
  MOD_RES (20)..(20): Xaa is AIB
  MOD_RES (40)..(40): Acylated with fatty acyl group
  MOD_RES (40)..(40): C-terminal amidation

SEQ ID NO: 765 - protein, 40 aa, Artificial Sequence
  Synthetic polypeptide
  MOD_RES (2)..(2): Xaa is AIB
  MOD_RES (10)..(10): Acylated with fatty acyl group via dipeptide spacer
  MOD_RES (20)..(20): Xaa is AIB
  MOD_RES (40)..(40): C-terminal amidation
YXEGTFTSDKSIYLDKQAAXEFVNWLLAGGPSSGAPPPSK

SEQ ID NO: 766 - protein, 40 aa, Artificial Sequence
  Synthetic polypeptide
  MOD_RES (2)..(2): Xaa is AIB
  MOD_RES (20)..(20): Xaa is AIB
  MOD_RES (24)..(24): Pegylated
  MOD_RES (40)..(40): C-terminal amidation
YXQGTFTSDYSIYLDKQAAXEFVCWLLAGGPSSGAPPPSK

SEQ ID NO: 767 - protein, 29 aa, Artificial Sequence
  Synthetic peptide
  MOD_RES (3)..(3): Xaa is Acetyldiaminobutanoic acid
  MOD_RES (16)..(16): Xaa is AIB
  MOD_RES (29)..(29): C-terminal amidation
HSXGTFTSDYSKYLDXRRAADFVAWLLDE

SEQ ID NO: 768 - protein, 29 aa, Artificial Sequence
  Synthetic peptide
  MOD_RES (3)..(3): Xaa is Acetyldiaminobutanoic acid
  MOD_RES (16)..(16): Xaa is AIB
  MOD_RES (29)..(29): C-terminal amidation
HSXGTFTSDYSKYLDXERAADFVAWLLDE

SEQ ID NO: 769 - protein, 31 aa, Artificial Sequence
  Synthetic peptide
  MOD_RES (1)..(1): Xaa is AIB, d-Lys, d-Cys, d-Ala
  MOD_RES (2)..(2): Xaa is Gly(N-Hexyl), Gly(N-Methyl), Phe(N-Methyl)
  MOD_RES (4)..(4): Xaa is AIB
  MOD_RES (26)..(26): Pegylated
  MOD_RES (31)..(31): C-terminal amidation
XXHXEGTFTSDYSKYLDEQAAKEFICWLMNT

SEQ ID NO: 770 - protein, 31 aa, Artificial Sequence
  Synthetic peptide
  MOD_RES (1)..(1): Xaa is AIB, d-Lys, d-Cys, d-Ala
  MOD_RES (2)..(2): Xaa is Gly(N-Hexyl), Gly(N-Methyl), Phe(N-Methyl)
  MOD_RES (4)..(4): Xaa is AIB
  MOD_RES (12)..(12): Acylated with fatty acyl group
  MOD_RES (18)..(18): Xaa is AIB
  MOD_RES (31)..(31): C-terminal amidation
XXHXQGTFTSDKSKYLDXRAAQDFVQWLMDT

SEQ ID NO: 771 - protein, 42 aa, Artificial Sequence
  Synthetic peptide
  MOD_RES (1)..(1): Xaa is AIB, d-Lys, d-Cys, d-Ala
  MOD_RES (2)..(2): Xaa is Gly(N-Hexyl), Gly(N-Methyl), Phe(N-Methyl)
  MOD_RES (4)..(4): Xaa is AIB
  MOD_RES (42)..(42): C-terminal amidation
XXHXEGTFTSDVSSYLEEQAAKEFIAWLVKGGPSSGAPPPSK

SEQ ID NO: 772 - protein, 31 aa, Artificial Sequence
  Synthetic peptide
  MOD_RES (1)..(1): Xaa is AIB, d-Lys, d-Cys, d-Ala
  MOD_RES (2)..(2): Xaa is Gly(N-Hexyl), Gly(N-Methyl), Phe(N-Methyl)
  MOD_RES (4)..(4): d-Ser
  MISC_FEATURE (18)..(22): Lactam ring between side chains of amino acids at positions 18 and 22
  MOD_RES (26)..(26): Pegylated
  MOD_RES (31)..(31): C-terminal amidation
XXHSQGTFTSDYSLYLDERAAKDFVCWLLDT

SEQ ID NO: 773 - protein, 31 aa, Artificial Sequence
  Synthetic peptide
  MOD_RES (1)..(1): Xaa is AIB, d-Lys, d-Cys, d-Ala
  MOD_RES (2)..(2): Xaa is Gly(N-Hexyl), Gly(N-Methyl), Phe(N-Methyl)
  MOD_RES (4)..(4): Xaa is AIB
  MOD_RES (18)..(18): Xaa is AIB
  MOD_RES (22)..(22): Xaa is AIB
  MOD_RES (26)..(26): Pegylated
  MOD_RES (31)..(31): C-terminal amidation
XXHXQGTFTSDYSKYLDXKRAXEFVCWLLDT

SEQ ID NO: 774 - protein, 31 aa, Artificial Sequence; identical to SEQ ID NO: 770
  Synthetic peptide
  MOD_RES (1)..(1): Xaa is AIB, d-Lys, d-Cys, d-Ala
  MOD_RES (2)..(2): Xaa is Gly(N-Hexyl), Gly(N-Methyl), Phe(N-Methyl)
  MOD_RES (4)..(4): Xaa is AIB
  MOD_RES (12)..(12): Acylated with fatty acyl group via dipeptide spacer
  MOD_RES (18)..(18): Xaa is AIB
  MOD_RES (31)..(31): C-terminal amidation

SEQ ID NO: 775 - protein, 31 aa, Artificial Sequence; identical to SEQ ID NO: 770
  Synthetic peptide
  MOD_RES (1)..(1): Xaa is AIB, d-Cys, d-Lys, d-Ala
  MOD_RES (2)..(2): Xaa is Gly(N-Hexyl), Gly(N-Methyl), Phe(N-Methyl)
  MOD_RES (4)..(4): Xaa is AIB
  MOD_RES (12)..(12): Acylated with fatty acyl group via acidic amino acid spacer
  MOD_RES (18)..(18): Xaa is AIB
  MOD_RES (31)..(31): C-terminal amidation

SEQ ID NO: 776 - protein, 31 aa, Artificial Sequence
  Synthetic peptide
  MOD_RES (1)..(1): Xaa is AIB, d-Lys, d-Cys, d-Ala
  MOD_RES (2)..(2): Xaa is Gly(N-Hexyl), Gly(N-Methyl), Phe(N-Methyl)
  MOD_RES (4)..(4): d-Ser
  MOD_RES (12)..(12): Acylated with fatty acyl group via dipeptide spacer
  MOD_RES (18)..(18): Xaa is AIB
  MOD_RES (31)..(31): C-terminal amidation
XXHSQGTFTSDKSKYLDXRAAQDFVQWLMDT

SEQ ID NO: 777 - protein, 31 aa, Artificial Sequence
  Synthetic peptide
  MOD_RES (1)..(1): Xaa is AIB, d-Lys, d-Cys, d-Ala
  MOD_RES (2)..(2): Xaa is Gly(N-Hexyl), Gly(N-Methyl), Phe(N-Methyl)
  MOD_RES (4)..(4): Xaa is AIB
  MOD_RES (12)..(12): Acylated with fatty acyl group via dipeptide spacer
  MOD_RES (18)..(18): Xaa is AIB
  MOD_RES (31)..(31): C-terminal amidation
XXHXQGTFTSDKSKYLDXRAAQDFVQWLLDT

SEQ ID NO: 778 - protein, 31 aa, Artificial Sequence
  Synthetic peptide
  MOD_RES (1)..(1): Xaa is AIB, d-Lys, d-Cys, d-Ala
  MOD_RES (2)..(2): Xaa is Gly(N-Hexyl), Gly(N-Methyl), Phe(N-Methyl)
  MOD_RES (4)..(4): Xaa is AIB
  MOD_RES (12)..(12): Acylated with fatty acyl group via dipeptide spacer
  MOD_RES (31)..(31): C-terminal amidation
XXHXQGTFTSDKSKYLDERAAQDFVQWLMDT

SEQ ID NO: 779 - protein, 31 aa, Artificial Sequence
  Synthetic peptide
  MOD_RES (1)..(1): Xaa is AIB, d-Lys, d-Cys, d-Ala
  MOD_RES (2)..(2): Xaa is Gly(N-Hexyl), Gly(N-Methyl), Phe(N-Methyl)
  MOD_RES (4)..(4): Xaa is AIB
  MOD_RES (12)..(12): Acylated with fatty acyl group via dipeptide spacer
  MOD_RES (18)..(18): Xaa is AIB
  MOD_RES (31)..(31): C-terminal amidation
XXHXQGTFTSDKSKYLEXRAAQDFVQWLMDT

SEQ ID NO: 780 - protein, 31 aa, Artificial Sequence
  Synthetic peptide
  MOD_RES (1)..(1): Xaa is AIB, d-Lys, d-Cys, d-Ala
  MOD_RES (2)..(2): Xaa is Gly(N-Hexyl), Gly(N-Methyl), Phe(N-Methyl)
  MOD_RES (4)..(4): d-Ser
  MOD_RES (12)..(12): Acylated with fatty acyl group via acidic amino acid spacer
  MOD_RES (31)..(31): C-terminal amidation
XXHSQGTFTSDKSKYLDERAAQDFVQWLLDT

SEQ ID NO: 781 - protein, 31 aa, Artificial Sequence
  Synthetic peptide
  MOD_RES (1)..(1): Xaa is AIB, d-Lys, d-Cys, d-Ala
  MOD_RES (2)..(2): Xaa is Gly(N-Hexyl), Gly(N-Methyl), Phe(N-Methyl)
  MOD_RES (4)..(4): Xaa is AIB
  MOD_RES (12)..(12): Acylated with fatty acyl group via acidic amino acid spacer
  MOD_RES (31)..(31): C-terminal amidation
XXHXQGTFTSDKSKYLDEQAAKEFIAWLLDT

SEQ ID NO: 782 - protein, 42 aa, Artificial Sequence
  Synthetic polypeptide
  MOD_RES (1)..(1): Xaa is AIB, d-Lys, d-Cys, d-Ala
  MOD_RES (2)..(2): Xaa is Gly(N-Hexyl), Gly(N-Methyl), Phe(N-Methyl)
  MOD_RES (4)..(4): Xaa is Aib
  MOD_RES (22)..(22): Xaa is Aib
  MOD_RES (42)..(42): C-terminal amidation
XXYXEGTFTSDYSIYLDKQAAXEFVNWLLAGGPSSGAPPPSK

SEQ ID NO: 783 - protein, 41 aa, Artificial Sequence
  Synthetic polypeptide
  MOD_RES (1)..(1): Xaa is AIB, d-Lys, d-Cys, d-Ala
  MOD_RES (2)..(2): Xaa is Gly(N-Hexyl), Gly(N-Methyl), Phe(N-Methyl)
  MOD_RES (4)..(4): Xaa is Aib
  MOD_RES (22)..(22): Xaa is Aib
  MOD_RES (41)..(41): C-terminal amidation
XXYXEGTFTSDYSIYLDKQAAXEFVNWLLAGGPSSGAPPPS

SEQ ID NO: 784 - protein, 41 aa, Artificial Sequence
  Synthetic polypeptide
  MOD_RES (1)..(1): Xaa is AIB, d-Lys, d-Cys, d-Ala
  MOD_RES (2)..(2): Xaa is Gly(N-Hexyl), Gly(N-Methyl), Phe(N-Methyl)
  MOD_RES (4)..(4): Xaa is Aib
  MOD_RES (12)..(12): Acylated with fatty acyl group via dipeptide spacer
  MOD_RES (22)..(22): Xaa is AIB
  MOD_RES (41)..(41): C-terminal amidation
XXYXEGTFTSDKSIYLDKQAAXEFVNWLLAGGPSSGAPPPS

SEQ ID NO: 785 - protein, 42 aa, Artificial Sequence
  Synthetic polypeptide
  MOD_RES (1)..(1): Xaa is AIB, d-Lys, d-Cys, d-Ala
  MOD_RES (2)..(2): Xaa is Gly(N-Hexyl), Gly(N-Methyl), Phe(N-Methyl)
  MOD_RES (4)..(4): Xaa is AIB
  MOD_RES (22)..(22): Xaa is AIB
  MOD_RES (26)..(26): Pegylated
  MOD_RES (42)..(42): C-terminal amidation
XXYXEGTFTSDYSIYLDKQAAXEFVCWLLAGGPSSGAPPPSK

SEQ ID NO: 786 - protein, 42 aa, Artificial Sequence
  Synthetic polypeptide
  MOD_RES (1)..(1): Xaa is AIB, d-Lys, d-Cys, d-Ala
  MOD_RES (2)..(2): Xaa is Gly(N-Hexyl), Gly(N-Methyl), Phe(N-Methyl)
  MOD_RES (4)..(4): Xaa is AIB
  MOD_RES (22)..(22): Xaa is AIB
  MOD_RES (42)..(42): Pegylated
  MOD_RES (42)..(42): C-terminal amidation
XXYXEGTFTSDYSIYLDKQAAXEFVNWLLAGGPSSGAPPPSC

SEQ ID NO: 787 - protein, 42 aa, Artificial sequence
  Synthetic polypeptide
  MOD_RES (1)..(1): Xaa is AIB, d-Lys, d-Cys, d-Ala
  MOD_RES (2)..(2): Xaa is Gly(N-Hexyl), Gly(N-Methyl), Phe(N-Methyl)
  MOD_RES (4)..(4): Xaa is AIB
  MISC_FEATURE (18)..(22): Lactam bridge between side chains of amino acids at positions 18 and 22
  MOD_RES (42)..(42): Pegylated
  MOD_RES (42)..(42): C-terminal amidation
XXYXEGTFTSDYSIYLDEQAAKEFVNWLLAGGPSSGAPPPSC

SEQ ID NO: 788 - protein, 42 aa, Artificial Sequence; identical to SEQ ID NO: 786
  Synthetic polypeptide
  MOD_RES (1)..(1): Xaa is AIB, d-Lys, d-Cys, d-Ala
  MOD_RES (2)..(2): Xaa is Gly(N-Hexyl), Gly(N-Methyl), Phe(N-Methyl)
  MOD_RES (4)..(4): Xaa is AIB
  MOD_RES (22)..(22): Xaa is AIB
  MOD_RES (42)..(42): Pegylated
  MOD_RES (42)..(42): C-terminal amidation

SEQ ID NO: 789 - protein, 42 aa, Artificial Sequence; identical to SEQ ID NO: 785
  Synthetic polypeptide
  MOD_RES (1)..(1): Xaa is AIB, d-Lys, d-Cys, d-Ala
  MOD_RES (2)..(2): Xaa is Gly(N-Hexyl), Gly(N-Methyl), Phe(N-Methyl)
  MOD_RES (4)..(4): Xaa is AIB
  MOD_RES (22)..(22): Xaa is AIB
  MOD_RES (26)..(26): Pegylated
  MOD_RES (42)..(42): C-terminal amidation

SEQ ID NO: 790 - protein, 42 aa, Artificial Sequence; identical to SEQ ID NO: 782
  Synthetic polypeptide
  MOD_RES (1)..(1): Xaa is AIB, d-Lys, d-Cys, d-Ala
  MOD_RES (2)..(2): Xaa is Gly(N-Hexyl), Gly(N-Methyl), Phe(N-Methyl)
  MOD_RES (4)..(4): Xaa is AIB
  MOD_RES (22)..(22): Xaa is AIB
  MOD_RES (42)..(42): Acylated with fatty acyl group
  MOD_RES (42)..(42): C-terminal amidation

SEQ ID NO: 791 - protein, 42 aa, Artificial Sequence
  Synthetic polypeptide
  MOD_RES (1)..(1): Xaa is AIB, d-Lys, d-Cys, d-Ala
  MOD_RES (2)..(2): Xaa is Gly(N-Hexyl), Gly(N-Methyl), Phe(N-Methyl)
  MOD_RES (4)..(4): Xaa is AIB
  MOD_RES (12)..(12): Acylated with fatty acyl group via dipeptide spacer
  MOD_RES (22)..(22): Xaa is AIB
  MOD_RES (42)..(42): C-terminal amidation
XXYXEGTFTSDKSIYLDKQAAXEFVNWLLAGGPSSGAPPPSK

SEQ ID NO: 792 - protein, 42 aa, Artificial Sequence
  Synthetic polypeptide
  MOD_RES (1)..(1): Xaa is AIB, d-Lys, d-Cys, d-Ala
  MOD_RES (2)..(2): Xaa is Gly(N-Hexyl), Gly(N-Methyl), Phe(N-Methyl)
  MOD_RES (4)..(4): Xaa is AIB
  MOD_RES (22)..(22): Xaa is AIB
  MOD_RES (26)..(26): Pegylated
  MOD_RES (42)..(42): C-terminal amidation
XXYXQGTFTSDYSIYLDKQAAXEFVCWLLAGGPSSGAPPPSK

SEQ ID NO: 793 - protein, 31 aa, Artificial Sequence
  Synthetic peptide
  MOD_RES (1)..(1): Xaa is AIB, d-Lys, d-Cys, d-Ala
  MOD_RES (2)..(2): Xaa is Gly(N-Hexyl), Gly(N-Methyl), Phe(N-Methyl)
  MOD_RES (5)..(5): Xaa is Acetyldiaminobutanoic acid
  MOD_RES (18)..(18): Xaa is AIB
  MOD_RES (31)..(31): C-terminal amidation
XXHSXGTFTSDYSKYLDXRRAADFVAWLLDE

SEQ ID NO: 794 - protein, 31 aa, Artificial Sequence
  Synthetic peptide
  MOD_RES (1)..(1): Xaa is AIB, d-Lys, d-Cys, d-Ala
  MOD_RES (2)..(2): Xaa is Gly(N-Hexyl), Gly(N-Methyl), Phe(N-Methyl)
  MOD_RES (5)..(5): Xaa is Acetyldiaminobutanoic acid
  MOD_RES (18)..(18): Xaa is AIB
  MOD_RES (31)..(31): C-terminal amidation
XXHSXGTFTSDYSKYLDXERAADFVAWLLDE

SEQ ID NO: 795-800 - skipped (6 entries)

SEQ ID NO: 801 - protein, 29 aa, Homo sapiens
HSQGTFTSDYSKYLDSRRAQDFVQWLMNT

SEQ ID NO: 802 - protein, 29 aa, Artificial Sequence
  Glucagon analogue
  MOD_RES (16)..(16): Xaa is Ser, Cys, Orn, homocysteine or acetyl phenyalanine
  MOD_RES (27)..(27): Xaa is Met, Leu or Nle
HSQGTFTSDYSKYLDXRRAQDFVQWLXDT

SEQ ID NO: 803 - protein, 29 aa, Artificial Sequence
  Glucagon analogue
  MOD_RES (17)..(17): Xaa is Arg, Cys, Orn, homocysteine or acetyl phenyalanine
  MOD_RES (27)..(27): Xaa is Met, Leu or Nle
HSQGTFTSDYSKYLDSXRAQDFVQWLXDT

SEQ ID NO: 804 - protein, 29 aa, Artificial Sequence
  Glucagon analogue
  MOD_RES (21)..(21): Xaa is Asp, Cys, Orn, homocysteine or acetyl phenylalanine
  MOD_RES (27)..(27): Xaa is Met, Leu or Nle
HSQGTFTSDYSKYLDSRRAQXFVQWLXDT

SEQ ID NO: 805 - protein, 29 aa, Artificial Sequence
  Synthetic peptide
  MOD_RES (24)..(24): Xaa is Gln, Cys, Orn, homocysteine or acetyl phenylalanine
  MOD_RES (27)..(27): Xaa is Met, Leu or Nle
HSQGTFTSDYSKYLDSRRAQDFVXWLXDT

SEQ ID NO: 806 - protein, 29 aa, Artificial Sequence
  Glucagon analogue
  MOD_RES (21)..(21): Xaa is Asp, Cys, Orn, homocysteine or acetyl phenyalanine
  MOD_RES (24)..(24): Xaa is Gln, Cys, Orn, homocysteine or acetyl phenyalanine
  MOD_RES (27)..(27): Xaa is Met, Leu or Nle
HSQGTFTSDYSKYLDSRRAQXFVXWLXDT

SEQ ID NO: 807 - protein, 29 aa, Artificial Sequence
  Glucagon analogue
  MOD_RES (27)..(27): Xaa is Met, Leu or Nle
  MOD_RES (28)..(28): Xaa is Lys, Arg, His, Asp, Glu, cysteic acid or homocysteic acid
  MOD_RES (29)..(29): Xaa is Thr, Lys, Arg, His, Asp, Glu, cysteic acid or homocysteic acid
HSQGTFTSDYSKYLDSRRAQDFVQWLXXX

SEQ ID NO: 808 - protein, 29 aa, Artificial Sequence
  Glucagon analogue
  MOD_RES (27)..(27): Xaa is Met, Leu or Nle
  MOD_RES (28)..(28): Xaa is Asp or Glu
  MOD_RES (29)..(29): Xaa is Thr, Asp or Glu
HSQGTFTSDYSKYLDSRRAQDFVQWLXXX

SEQ ID NO: 809 - protein, 29 aa, Artificial Sequence
  Glucagon analogue
  MOD_RES (27)..(27): Xaa is Met, Leu or Nle
  MOD_RES (29)..(29): Xaa is Asp or Glu
HSQGTFTSDYSKYLDSRRAQDFVQWLXNX

SEQ ID NO: 810 - protein, 29 aa, Artificial Sequence
  Synthetic peptide
  MOD_RES (27)..(27): Xaa is Met, Leu or Nle
HSQGTFTSDYSKYLDSRRAQDFVQWLXDT

SEQ ID NO: 811 - protein, 29 aa, Artificial Sequence
  Glucagon analogue
HSQGTFTSDYSKYLDSRRAQDFVQWLMDT

SEQ ID NO: 812 - protein, 29 aa, Artificial Sequence
  Glucagon analogue
  MOD_RES (29)..(29): Xaa is Lys, Arg or His
HSQGTFTSDYSKYLDSRRAQDFVQWLMNX

SEQ ID NO: 813 - protein, 29 aa, Artificial Sequence
  Glucagon analogue
HSQGTFTSDYSKYLESRRAQDFVQWLMDT

SEQ ID NO: 814 - protein, 29 aa, Artificial Sequence
  Synthetic peptide
  MOD_RES (16)..(16): Pegylation
  MOD_RES (27)..(27): Xaa is Met, Leu or Nle
HSQGTFTSDYSKYLDCRRAQDFVQWLXDT

SEQ ID NO: 815 - protein, 29 aa, Artificial Sequence
  Glucagon analogue
  MOD_RES (17)..(17): Pegylation
  MOD_RES (27)..(27): Xaa is Met, Leu or Nle
HSQGTFTSDYSKYLDSCRAQDFVQWLXDT

SEQ ID NO: 816 - protein, 29 aa, Artificial Sequence
  Glucagon analogue
  MOD_RES (21)..(21): Pegylation
  MOD_RES (27)..(27): Xaa is Met, Leu or Nle
HSQGTFTSDYSKYLDSRRAQCFVQWLXDT

SEQ ID NO: 817 - protein, 29 aa, Artificial Sequence
  Glucagon analogue
  MOD_RES (24)..(24): Pegylation
  MOD_RES (27)..(27): Xaa is Met, Leu or Nle
HSQGTFTSDYSKYLDSRRAQDFVCWLXDT

SEQ ID NO: 818 - protein, 29 aa, Artificial Sequence
  Glucagon analogue
  MOD_RES (21)..(21): Pegylation
  MOD_RES (27)..(27): Xaa is Met, Leu or Nle
HSQGTFTSDYSRYLDSRRAQKFVQWLXDT

SEQ ID NO: 819 - protein, 29 aa, Artificial Sequence
  Glucagon analogue
  MOD_RES (24)..(24): Pegylation
  MOD_RES (27)..(27): Xaa is Met, Leu or Nle
HSQGTFTSDYSRYLDSRRAQDFVKWLXDT

SEQ ID NO: 820 - protein, 10 aa, Artificial Sequence
  Synthetic peptide
  MISC_FEATURE: Peptide fragment representing carboxy terminal 10 amino acids of Exendin-4
GPSSGAPPPS

SEQ ID NO: 821 - protein, 8 aa, Artificial Sequence
  Synthetic peptide
  MISC_FEATURE: Peptide fragment representing the carboxy terminal 8 amino acids of oxyntomodulin
KRNRNNIA

SEQ ID NO: 822 - protein, 4 aa, Artificial Sequence
  Synthetic peptide
  MISC_FEATURE: Peptide fragment representing the amino 4 amino acids of oxyntomodulin carboxy terminus of SEQ ID NO: 21
KRNR

SEQ ID NO: 823 - protein, 10 aa, Artificial Sequence
  Synthetic peptide
  MISC_FEATURE: Peptide fragment representing the carboxy terminal 10 amino acids of Exendin-4
  MOD_RES (10)..(10): AMIDATION
GPSSGAPPPS

SEQ ID NO: 824 - protein, 39 aa, Artificial Sequence
  Glucagon analogue
HSQGTFTSDYSKYLDSRRAQDFVQWLMDTGPSSGAPPPS

SEQ ID NO: 825 - protein, 37 aa, Artificial Sequence; identical to SEQ ID NO: 706
  Glucagon analogue

SEQ ID NO: 826 - protein, 33 aa, Artificial Sequence
  Glucagon analogue
HSQGTFTSDYSKYLDSRRAQDFVQWLMDTKRNR

SEQ ID NO: 827 - protein, 29 aa, Artificial Sequence
  Glucagon analogue
HSQGTFTSDYSKYLDSCRAQDFVQWLMNT

SEQ ID NO: 828 - protein, 39 aa, Artificial Sequence; identical to SEQ ID NO: 521
  Synthetic peptide

SEQ ID NO: 829 - protein, 29 aa, Artificial Sequence
  Glucagon analogue
  MOD_RES (24)..(24): 2-butyrolactone bound through Cys thiol group
HSQGTFTSDYSKYLDSRRAQDFVQWLMNT

SEQ ID NO: 830 - protein, 29 aa, Artificial Sequence
  Glucagon analogue
  MOD_RES (24)..(24): Carboxymethyl group bound through Cys thiol group
HSQGTFTSDYSKYLDSRRAQDFVQWLMNT

SEQ ID NO: 831 - protein, 39 aa, Artificial Sequence; identical to SEQ ID NO: 521
  Glucagon analogue

SEQ ID NO: 832 - protein, 30 aa, Artificial Sequence
  Glucagon analog
  MOD_RES (30)..(30): Xaa is Asp, Glu, Lys, Arg or His
HSQGTFTSDYSKYLDSRRAQDFVQWLMDTX

SEQ ID NO: 833 - protein, 29 aa, Artificial Sequence
  Glucagon analogue
  MOD_RES (15)..(15): Xaa is Asp, Glu, cysteic acid, homoglutamic acid or homocysteic acid
  MOD_RES (27)..(27): Xaa is Met, Leu or Nle
  MOD_RES (28)..(28): Xaa is Asn, Lys, Arg, His, Asp or Glu
  MOD_RES (29)..(29): Xaa is Thr, Lys, Arg, His, Asp or Glu
HSQGTFTSDYSKYLXSRRAQDFVQWLXXX

SEQ ID NO: 834 - protein, 29 aa, Artificial Sequence
  Glucagon analogue
  MOD_RES (15)..(15): Xaa is Asp, Glu, cysteic acid, homoglutamic acid or homocysteic acid
  MOD_RES (27)..(27): Xaa is Met, Leu or Nle
  MOD_RES (28)..(28): Xaa is Asn or an acidic amino acid
  MOD_RES (29)..(29): Xaa is Thr or an acidic amino acid
HSQGTFTSDYSKYLXSRRAQDFVQWLXXX

SEQ ID NO: 835 - protein, 39 aa, Artificial Sequence
  Synthetic peptide
HSQGTFTSDYSKYLDSRRAQDFVQWLMETGPSSGAPPPS

SEQ ID NO: 836 - protein, 37 aa, Artificial Sequence
  Glucagon analogue
HSQGTFTSDYSKYLDSRRAQDFVQWLMETKRNRNNIA

SEQ ID NO: 837 - protein, 33 aa, Artificial Sequence
  Glucagon analogue
HSQGTFTSDYSKYLDSRRAQDFVQWLMETKRNR

SEQ ID NO: 838 - protein, 29 aa, Artificial Sequence
  Glucagon analogue
HSQGTFTSDYSKYLDSRRAQDFVQWLMET

SEQ ID NO: 839 - protein, 27 aa, Artificial Sequence
  Synthetic peptide
  MOD_RES (1)..(1): Xaa is an amino acid that reduces susceptibility of the incretin peptide to cleavage by dipeptidyl peptidase IV
  MOD_RES (2)..(2): Xaa is an amino acid that reduces susceptibility of the incretin peptide to cleavage by dipeptidyl peptidase IV
  MOD_RES (27)..(27): Met comprises Z
XXQGTFTSDYSKYLDSRRAQDFVQWLM

SEQ ID NO: 840 - protein, 29 aa, Artificial Sequence
  Synthetic peptide
  MOD_RES (1)..(1): Xaa is alpha, alpha-dimethyl imidiazole acetic acid (DMIA)
  MISC_FEATURE (16)..(20): Lactam bridge between residues 16 and 20
  MOD_RES (24)..(24): Pegylation
XSQGTFTSDYSKYLDERRAKDFVCWLMNT

SEQ ID NO: 841 - protein, 29 aa, Artificial Sequence
  Synthetic peptide
  MOD_RES (1)..(1): Xaa is alpha, alpha-dimethyl imidiazole acetic acid (DMIA)
  MISC_FEATURE (16)..(20): Lactam bridge between residues 16 and 20
  MOD_RES (24)..(24): Glutamine to alanine mutation
  MOD_RES (29)..(29): Pegylation
XSQGTFTSDYSKYLDERRAKDFVAWLMNC

SEQ ID NO: 842 - protein, 29 aa, Artificial Sequence
  Synthetic peptide
  MOD_RES (1)..(1): Xaa is alpha, alpha-dimethyl imidiazole acetic acid (DMIA)
  MISC_FEATURE (16)..(20): Lactam bridge between residues 16 and 20
  MOD_RES (24)..(24): Pegylation
  MOD_RES (27)..(27): Xaa is Nle or Leu
XSQGTFTSDYSKYLDERRAKDFVCWLXNT

SEQ ID NO: 843 - protein, 29 aa, Artificial Sequence
  Synthetic peptide
  MOD_RES (1)..(1): Xaa is alpha, alpha-dimethyl imidiazole acetic acid (DMIA)
  MISC_FEATURE (16)..(20): Lactam bridge between residues 16 and 20
  MISC_FEATURE (24)..(24): Glutamine to alanine mutation
  MISC_FEATURE (27)..(27): Xaa is Nle or Leu
  MOD_RES (29)..(29): Pegylation
XSQGTFTSDYSKYLDERRAKDFVAWLXNC

SEQ ID NO: 844 - protein, 29 aa, Artificial Sequence
  Synthetic peptide
  MISC_FEATURE: SEQ ID NO: 1 with  Ala 20, Ala 24, Nle 27, and Asp 28
  MOD_RES (27)..(27): Xaa is Nle
HSQGTFTSDYSKYLDSRRAADFVAWLXDT

SEQ ID NO: 845 - protein, 29 aa, Artificial Sequence
  Synthetic peptide
  MISC_FEATURE: SEQ ID NO: 1 with Ala 20, Ala 24, Nle27 , Asp 28, and Glu 29
  MOD_RES (27)..(27): Xaa is Nle
HSQGTFTSDYSKYLDSRRAADFVAWLXDE

SEQ ID NO: 846 - protein, 30 aa, Artificial Sequence
  Synthetic peptide
  MISC_FEATURE: SEQ ID NO: 1 with Ala 20, Ala 24, Nle 27, Asp 28, and Glu 30
  MOD_RES (27)..(27): Xaa is Nle
HSQGTFTSDYSKYLDSRRAADFVAWLXDTE

SEQ ID NO: 847 - protein, 29 aa, Artificial Sequence
  Synthetic peptide
  MISC_FEATURE: SEQ ID NO: 1 with Ala 20, Ala 24, Nle 27, Glu 28, and Glu 29
  MOD_RES (27)..(27): Xaa is Nle
HSQGTFTSDYSKYLDSRRAADFVAWLXEE

SEQ ID NO: 848 - protein, 30 aa, Artificial Sequence
  Synthetic peptide
  MISC_FEATURE: SEQ ID NO: 1 with Ala 20, Ala 24, Nle 27, Glu 28, and Glu 30
  MOD_RES (27)..(27): Xaa is Nle
HSQGTFTSDYSKYLDSRRAADFVAWLXETE

SEQ ID NO: 849 - protein, 30 aa, Artificial Sequence
  Synthetic peptide
  MOD_RES (27)..(27): Xaa is Nle
  MISC_FEATURE (27)..(27): SEQ ID NO: 1 with Ala 20, Ala 24, Nle 27, Glu 29, and Glu 30
HSQGTFTSDYSKYLDSRRAADFVAWLXNEE

SEQ ID NO: 850 - protein, 29 aa, Artificial Sequence
  Synthetic peptide
  MISC_FEATURE: SEQ ID NO: 1 with Ala 20, Glu 21, Ala 24, Nle 27, and Asp 28
  MOD_RES (27)..(27): Xaa is Nle
HSQGTFTSDYSKYLDSRRAAEFVAWLXDT

SEQ ID NO: 851 - protein, 29 aa, Artificial Sequence
  Synthetic peptide
  MISC_FEATURE: SEQ ID NO: 1 with Ala 20, Glu 21, Ala 24, Nle 27, Asp 28, and Glu 29
  MOD_RES (27)..(27): Xaa is Nle
HSQGTFTSDYSKYLDSRRAAEFVAWLXDE

SEQ ID NO: 852 - protein, 29 aa, Artificial Sequence
  Synthetic peptide
  MISC_FEATURE: SEQ ID NO: 1 with Ala 20, Glu 21, Ala 24, Nle 27, Asp 28, and Glu 30
  MOD_RES (27)..(27): Xaa is Nle
HSQGTFTSDYSKYLDSRRAAEFVAWLXDE

SEQ ID NO: 853 - protein, 29 aa, Artificial Sequence
  Synthetic peptide
  MISC_FEATURE: SEQ ID NO :1 with Ala 20, Glu 21, Ala 24, Nle 27, Glu 28, and Glu 29
  MOD_RES (27)..(27): Xaa is Nle
HSQGTFTSDYSKYLDSRRAAEFVAWLXEE

SEQ ID NO: 854 - protein, 29 aa, Artificial Sequence
  Synthetic peptide
  MISC_FEATURE: SEQ ID NO: 1 with Ala 20, Glu 21, Ala 24, Nle 27, Glu 28, and Glu 30
HSQGTFTSDYSKYLDSRRAQDFVQWLMNT

SEQ ID NO: 855 - protein, 30 aa, Artificial Sequence
  Synthetic peptide
  MISC_FEATURE: SEQ ID NO: 1 with Ala 20, Glu 21, Ala 24, Nle 27, Glu 29, and Glu 30
  MOD_RES (27)..(27): Xaa is Nle
HSQGTFTSDYSKYLDSRRAAEFVAWLXNEE

SEQ ID NO: 856 - protein, 29 aa, Artificial Sequence
  Synthetic peptide
  MISC_FEATURE: SEQ ID NO: 1 with Thr 16, Ala 20, Glu 21, Ala 24, Nle 27, Asp 28, and Glu29
  MOD_RES (27)..(27): Xaa is Nle
HSQGTFTSDYSKYLDTRRAAEFVAWLXDE

SEQ ID NO: 857 - protein, 31 aa, Homo sapiens; identical to SEQ ID NO: 703

SEQ ID NO: 858 - protein, 30 aa, Homo sapiens; identical to SEQ ID NO: 704
  MOD_RES (30)..(30): AMIDATION

SEQ ID NO: 859 - protein, 29 aa, Artificial Sequence
  Synthetic peptide
  MOD_RES (3)..(3): Xaa is Glutamine analog
  MOD_RES (27)..(27): Xaa is Nle
HSXGTFTSDYSKYLDTRRAAEFVAWLXDE

SEQ ID NO: 860 - protein, 29 aa, Artificial Sequence
  Synthetic peptide
  MOD_RES (3)..(3): Xaa is Glutamine analog
  MOD_RES (16)..(16): Xaa is Aminoisobutryic acid
HSXGTFTSDYSKYLDXRRAADFVAWLMDE

SEQ ID NO: 861 - protein, 29 aa, Artificial Sequence
  Synthetic peptide
  MOD_RES (27)..(27): Xaa is Nle
HSQGTFTSDYSKYLDTRRAAEFVAWLXDE

SEQ ID NO: 862 - protein, 29 aa, Artificial Sequence
  Synthetic peptide
  MOD_RES (3)..(3): Xaa is Acetamidomethyl-cysteine
  MOD_RES (27)..(27): Xaa is Nle
HSXGTFTSDYSKYLDTRRAAEFVAWLXDE

SEQ ID NO: 863 - protein, 29 aa, Artificial Sequence
  Synethic peptide
  MOD_RES (3)..(3): Xaa is Acetyldiaminobutanoic acid
  MOD_RES (27)..(27): Xaa is Nle
HSXGTFTSDYSKYLDTRRAAEFVAWLXDE

SEQ ID NO: 864 - protein, 29 aa, Artificial Sequence
  Synthetic peptide
  MOD_RES (3)..(3): Xaa is Carbamoyldiaminopropanoic acid
  MOD_RES (27)..(27): Xaa is Nle
HSXGTFTSDYSKYLDTRRAAEFVAWLXDE

SEQ ID NO: 865 - protein, 29 aa, Artificial Sequence
  Synthetic peptide
  MOD_RES (3)..(3): Xaa is Methylglutamine
  MOD_RES (27)..(27): Xaa is Nle
HSXGTFTSDYSKYLDTRRAAEFVAWLXDE

SEQ ID NO: 866 - protein, 29 aa, Artificial Sequence
  Synthetic peptide
  MOD_RES (3)..(3): Xaa is Methionine sulfoxide
  MOD_RES (27)..(27): Xaa is Nle
HSXGTFTSDYSKYLDTRRAAEFVAWLXDE

SEQ ID NO: 867 - protein, 29 aa, Artificial Sequence
  Synthetic peptide
  MOD_RES (3)..(3): Xaa is Acetylornithine
  MOD_RES (27)..(27): Xaa is Nle
HSXGTFTSDYSKYLDTRRAAEFVAWLXDE

SEQ ID NO: 868 - protein, 29 aa, Artificial Sequence
  Synthetic peptide
  MOD_RES (16)..(16): Xaa is Aminoisobutryic acid
HSQGTFTSDYSKYLDXRRAADFVAWLMDE

SEQ ID NO: 869 - protein, 29 aa, Artificial Sequence
  Synthetic peptide
  MOD_RES (3)..(3): Xaa is Acetyldiaminobutanoic acid
  MOD_RES (16)..(16): Xaa is Aminoisobutryic acid
HSXGTFTSDYSKYLDXRRAADFVAWLMDE

SEQ ID NO: 870 - protein, 29 aa, Artificial Sequence
  Synthetic peptide
  MOD_RES (3)..(3): Xaa is Methylglutamine
  MOD_RES (16)..(16): Xaa is Aib
HSXGTFTSDYSKYLDXRRAADFVAWLMDE

SEQ ID NO: 871 - protein, 29 aa, Artificial Sequence
  Synthetic peptide
  MOD_RES (3)..(3): Xaa is acetyldiaminobutanoic acid
  MOD_RES (16)..(16): Xaa is Aib
HSXGTFTSDYSKYLDXRRAADFVAWLLDE

SEQ ID NO: 872 - protein, 39 aa, Artificial Sequence; identical to SEQ ID NO: 604
  Synthetic peptide
  MOD_RES (3)..(3): Xaa is Acetyldiaminobutanoic acid
  MOD_RES (16)..(16): Aminoisobutryic Acid
  MOD_RES (39)..(39): AMIDATION

SEQ ID NO: 873 - protein, 29 aa, Artificial Sequence
  Synthetic peptide
  MOD_RES (3)..(3): Xaa is Acetyldiaminobutanoic acid
  MOD_RES (16)..(16): Xaa is Aminoisobutryric acid
HSXGTFTSDYSKYLDXRRASDFVSWLLDE

SEQ ID NO: 874 - protein, 29 aa, Artificial Sequence
  Synthetic peptide
  MOD_RES (3)..(3): Xaa is Acetyldiaminobutanoic acid
  MOD_RES (16)..(16): Xaa is Aminoisobutryic acid
HSXGTFTSDYSKYLDXRRATDFVTWLLDE

SEQ ID NO: 875 - protein, 29 aa, Artificial Sequence
  Synthetic peptide
HSQGTFTSDYSKYLDSRRAQDFVQWLMDE

SEQ ID NO: 876 - protein, 29 aa, Artificial Sequence
  Synthetic peptide
  MOD_RES (16)..(16): Xaa is Aib
HSQGTFTSDYSKYLDXRRAQDFVQWLMDE

SEQ ID NO: 877 - protein, 29 aa, Artificial Sequence
  Synthetic peptide
  misc_feature (3)..(3): Xaa can be any naturally occurring amino acid
HSXGTFTSDYSKYLDSRRAQDFVQWLMNT

SEQ ID NO: 878 - protein, 29 aa, Artificial Sequence
  Synthetic peptide
HSQGTFTSDYSKYLDSRRAQDFVQWLMDT

SEQ ID NO: 879 - protein, 30 aa, Artificial Sequence; identical to SEQ ID NO: 581
  Synthetic peptide
  MOD_RES (2)..(2): Xaa is d-Ser
  MOD_RES (30)..(30): Acylated with a C14 fatty acyl group
  MOD_RES (30)..(30): AMIDATION

SEQ ID NO: 880 - protein, 29 aa, Artificial Sequence
  Synthetic peptide
  MOD_RES (2)..(2): Xaa is d-Ser
  MOD_RES (10)..(10): Acylated with a C14 fatty acyl group
  MOD_RES (29)..(29): AMIDATION
HXQGTFTSDKSKYLDERRAKDFVQWLMNT

SEQ ID NO: 881 - protein, 30 aa, Artificial Sequence; identical to SEQ ID NO: 581
  Synthetic peptide
  MOD_RES (2)..(2): Xaa is d-Ser
  MOD_RES (30)..(30): Acylated with a C16 fatty acyl group
  MOD_RES (30)..(30): AMIDATION

SEQ ID NO: 882 - protein, 29 aa, Artificial Sequence
  Synthetic peptide
  MOD_RES (2)..(2): Xaa is d-Ser
  MOD_RES (10)..(10): Acylated with a C16 fatty acyl group
  MOD_RES (29)..(29): AMIDATION
HXQGTFTSDKSKYLDERRAKDFVQWLMNT

SEQ ID NO: 883 - protein, 29 aa, Artificial Sequence
  Synthetic peptide
  MOD_RES (2)..(2): Aminoisobutryic Acid
  MOD_RES (10)..(10): Acylated with a C18 fatty acyl group
  MOD_RES (24)..(24): Cys-PEG
  MOD_RES (29)..(29): AMIDATION
HXQGTFTSDKSKYLDEQAAKEFICWLMNT

SEQ ID NO: 884 - protein, 30 aa, Artificial Sequence; identical to SEQ ID NO: 586
  Synthetic peptide
  MOD_RES (2)..(2): Aminoisobutryic Acid
  MOD_RES (24)..(24): Cys-PEG
  MOD_RES (30)..(30): Acylated with a C18 fatty acyl group
  MOD_RES (30)..(30): AMIDATION

SEQ ID NO: 885 - protein, 29 aa, Artificial sequence
  Synthetic peptide
  MOD_RES (16)..(16): Xaa is Ser or alpha, alpha-disubstituted amino acid
  MOD_RES (20)..(20): Xaa is Gln or alpha, alpha-disubstituted amino acid
  MOD_RES (21)..(21): Xaa is Asp or alpha, alpha-disubstituted amino acid
  MOD_RES (24)..(24): Xaa is Gln or alpha, alpha-disubstituted amino acid
HSQGTFTSDYSKYLDXRRAXXFVXWLMNT

SEQ ID NO: 886 - protein, 29 aa, Artificial Sequence
  Synthetic peptide
  MOD_RES (16)..(16): Xaa is Aib
HSQGTFTSDYSKYLDXRRAQDFVQWLMNT

SEQ ID NO: 887 - protein, 29 aa, Artificial Sequence
  Synthetic peptide
  MOD_RES (19)..(19): Xaa is Aib
HSQGTFTSDYSKYLDSRRXQDFVQWLMNT

SEQ ID NO: 888 - protein, 29 aa, Artificial Sequence
  Synthetic peptide
  MOD_RES (20)..(20): Xaa is Aib
HSQGTFTSDYSKYLDSRRAXDFVQWLMNT

SEQ ID NO: 889 - protein, 29 aa, Artificial Sequence
  Synthetic peptide
  MOD_RES (21)..(21): Xaa is Aib
HSQGTFTSDYSKYLDSRRAQXFVQWLMNT

SEQ ID NO: 890 - protein, 29 aa, Artificial Sequence
  Synthetic peptide
  MOD_RES (24)..(24): Xaa is Aib
HSQGTFTSDYSKYLDSRRAQDFVXWLMNT

SEQ ID NO: 891 - protein, 29 aa, Artificial Sequence
  Synthetic peptide
  MOD_RES (16)..(16): Xaa is Aib
  MOD_RES (20)..(20): Xaa is Aib
HSQGTFTSDYSKYLDXRRAXDFVQWLMNT

SEQ ID NO: 892 - protein, 29 aa, Artificial Sequence
  Synthetic peptide
  MOD_RES (16)..(16): Xaa is Aib
  MOD_RES (24)..(24): Xaa is Aib
HSQGTFTSDYSKYLDXRRAQDFVXWLMNT

SEQ ID NO: 893 - protein, 29 aa, Artificial Sequence
  Synthetic peptide
  MOD_RES (20)..(20): Xaa is Aib
  MOD_RES (24)..(24): Xaa is Aib
HSQGTFTSDYSKYLDSRRAXDFVXWLMNT

SEQ ID NO: 894 - protein, 29 aa, Artificial Sequence
  Synthetic peptide
  MOD_RES (16)..(16): Xaa is Aib
  MOD_RES (20)..(20): Xaa is Aib
  MOD_RES (24)..(24): Xaa is Aib
HSQGTFTSDYSKYLDXRRAXDFVXWLMNT

SEQ ID NO: 895 - protein, 29 aa, Artificial Sequence
  Synthetic peptide
  MOD_RES (2)..(2): Xaa is Aib
  MOD_RES (16)..(16): Xaa is Aib
  MOD_RES (29)..(29): AMIDATION
HXQGTFTSDKSKYLDXRRAQDFVQWLMNT

SEQ ID NO: 896 - protein, 29 aa, Artificial Sequence
  Synthetic peptide
  MOD_RES (2)..(2): Xaa is Aib
  MOD_RES (16)..(16): Xaa is Aib
  MOD_RES (29)..(29): AMIDATION
HXQGTFTSDYSKYLDXRRAQDFVQWLMNT

SEQ ID NO: 897 - protein, 29 aa, Artificial Sequence
  Synthetic peptide
  MOD_RES (2)..(2): Xaa is Aib
  MOD_RES (10)..(10): Acylated with a C16 fatty acyl group
  MOD_RES (16)..(16): Xaa is Aib
  MOD_RES (29)..(29): AMIDATION
HXQGTFTSDKSKYLDXRRAQDFVQWLMNT

SEQ ID NO: 898 - protein, 29 aa, Artificial Sequence
  Synthetic peptide
  MOD_RES (2)..(2): Xaa is Aib
  MOD_RES (10)..(10): Acylated with a C16 fatty acyl group via Ala-Ala spacer
  MOD_RES (16)..(16): Xaa is Aib
  MOD_RES (29)..(29): AMIDATION
HXQGTFTSDKSKYLDXRRAQDFVQWLMNT

SEQ ID NO: 899 - protein, 29 aa, Artificial Sequence
  Synthetic peptide
  MOD_RES (2)..(2): Xaa is Aib
  MOD_RES (10)..(10): Acylated with a C16 fatty acyl group via dipeptide spacer
  MOD_RES (16)..(16): Xaa is Aib
  MOD_RES (29)..(29): AMIDATION
HXQGTFTSDKSKYLDXRRAQDFVQWLMNT

SEQ ID NO: 900 - protein, 29 aa, Artificial Sequence
  Synthetic peptide
  MOD_RES (2)..(2): Xaa is Aib
  MOD_RES (10)..(10): Acylated with a C16 fatty acyl group via beta-Ala-beta-Ala spacer
  MOD_RES (16)..(16): Xaa is Aib
  MOD_RES (29)..(29): AMIDATION
HXQGTFTSDKSKYLDXRRAQDFVQWLMNT

SEQ ID NO: 901 - protein, 29 aa, Artificial Sequence
  Synthetic peptide
  MOD_RES (2)..(2): Xaa is Aib
  MOD_RES (10)..(10): Acylated with a C16 fatty acyl group via 6-aminohexanoic acid spacer
  MOD_RES (16)..(16): Xaa is Aib
  MOD_RES (29)..(29): AMIDATION
HXQGTFTSDKSKYLDXRRAQDFVQWLMNT

SEQ ID NO: 902 - protein, 29 aa, Artificial Sequence
  Synthetic peptide
  MOD_RES (2)..(2): Xaa is Aib
  MOD_RES (10)..(10): Acylated with a C16 fatty acyl group via Leu-Leu spacer
  MOD_RES (16)..(16): Xaa is Aib
  MOD_RES (29)..(29): AMIDATION
HXQGTFTSDKSKYLDXRRAQDFVQWLMNT

SEQ ID NO: 903 - protein, 29 aa, Artificial Sequence
  Synthetic peptide
  MOD_RES (2)..(2): Xaa is Aib
  MOD_RES (10)..(10): Acylated with a C16 fatty acyl group via Pro-Pro spacer
  MOD_RES (16)..(16): Xaa is Aib
  MOD_RES (29)..(29): AMIDATION
HXQGTFTSDKSKYLDXRRAQDFVQWLMNT

SEQ ID NO: 904 - protein, 29 aa, Artificial Sequence
  Synthetic peptide
  MOD_RES (2)..(2): Xaa is Aib
  MOD_RES (10)..(10): Acylated with a C14 fatty acyl group
  MOD_RES (16)..(16): Xaa is Aib
  MOD_RES (24)..(24): Cys-PEG
  MOD_RES (29)..(29): AMIDATION
HXQGTFTSDKSKYLDXRRAQDFVCWLMNT

SEQ ID NO: 905 - protein, 29 aa, Artificial Sequence
  Synthetic peptide
  MOD_RES (2)..(2): Xaa is Aib
  MOD_RES (10)..(10): Acylated with a C14 fatty acyl group via dipeptide spacer
  MOD_RES (16)..(16): Xaa is Aib
  MOD_RES (24)..(24): Cys-PEG
  MOD_RES (29)..(29): AMIDATION
HXQGTFTSDKSKYLDXRRAQDFVCWLMNT

SEQ ID NO: 906 - protein, 29 aa, Artificial Sequence
  Synthetic peptide
  MOD_RES (2)..(2): Xaa is Aib
  MOD_RES (10)..(10): Acylated with a C14 fatty acyl group via dipeptide spacer
  MOD_RES (16)..(16): Xaa is Aib
  MOD_RES (29)..(29): AMIDATION
HXQGTFTSDKSKYLDXRRAQDFVQWLMNT

SEQ ID NO: 907 - protein, 29 aa, Artificial Sequence
  Synthetic peptide
  MOD_RES (2)..(2): Xaa is Aib
  MOD_RES (10)..(10): Acylated with a C14 fatty acyl group via Ala-Ala spacer
  MOD_RES (16)..(16): Xaa is Aib
  MOD_RES (24)..(24): Cys-PEG
  MOD_RES (29)..(29): AMIDATION
HXQGTFTSDKSKYLDXRRAQDFVCWLMNT

SEQ ID NO: 908 - protein, 29 aa, Artificial Sequence
  Synthetic peptide
  MOD_RES (2)..(2): Xaa is Aib
  MOD_RES (10)..(10): Acylated with a C14 fatty acyl group via Ala-Ala spacer
  MOD_RES (16)..(16): Xaa is Aib
  MOD_RES (29)..(29): AMIDATION
HXQGTFTSDKSKYLDXRRAQDFVQWLMNT

SEQ ID NO: 909 - protein, 29 aa, Artificial Sequence
  Synthetic peptide
  MOD_RES (2)..(2): Xaa is Aib
  MOD_RES (10)..(10): Acylated with a C16 fatty acyl group via Ala-Ala spacer
  MOD_RES (16)..(16): Xaa is Aib
  MOD_RES (24)..(24): Cys-PEG
  MOD_RES (29)..(29): AMIDATION
HXQGTFTSDKSKYLDXRRAQDFVCWLMNT

SEQ ID NO: 910 - protein, 29 aa, Artificial Sequence
  Synthetic peptide
  MOD_RES (2)..(2): Xaa is Aib
  MOD_RES (10)..(10): Acylated with a C16 fatty acyl group via dipeptide spacer
  MOD_RES (16)..(16): Xaa is Aib
  MOD_RES (24)..(24): Cys-PEG
  MOD_RES (29)..(29): AMIDATION
HXQGTFTSDKSKYLDXRRAQDFVCWLMNT

SEQ ID NO: 911 - protein, 29 aa, Artificial Sequence
  Synthetic peptide
  MOD_RES (2)..(2): Xaa is Aib
  MOD_RES (10)..(10): Covalently bound to a C14 fatty acyl group
  MOD_RES (16)..(16): Xaa is Aib
  MOD_RES (29)..(29): AMIDATION
HXQGTFTSDKSKYLDXRRAQDFVCWLMNT

SEQ ID NO: 912 - protein, 29 aa, Artificial Sequence
  Synthetic peptide
  MOD_RES (2)..(2): Xaa is Aib
  MOD_RES (10)..(10): Covalently bound to C14 fatty acyl group via dipeptide spacer
  MOD_RES (16)..(16): Xaa is Aib
  MOD_RES (29)..(29): AMIDATION
HXQGTFTSDKSKYLDXRRAQDFVCWLMNT

SEQ ID NO: 913 - protein, 29 aa, Artificial Sequence
  Synthetic peptide
  MOD_RES (2)..(2): Xaa is Aib
  MOD_RES (10)..(10): Covalently bound to C14 fatty acyl group via Ala-Ala spacer
  MOD_RES (16)..(16): Xaa is Aib
  MOD_RES (29)..(29): AMIDATION
HXQGTFTSDKSKYLDXRRAQDFVCWLMNT

SEQ ID NO: 914 - protein, 29 aa, Artificial Sequence
  Synthetic peptide
  MOD_RES (2)..(2): Xaa is Aib
  MOD_RES (10)..(10): Covalently bound to C16 fatty acyl group via dipeptide spacer
  MOD_RES (16)..(16): Xaa is Aib
  MOD_RES (29)..(29): AMIDATION
HXQGTFTSDKSKYLDXRRAQDFVCWLMNT

SEQ ID NO: 915 - protein, 29 aa, Artificial Sequence
  Synthetic peptide
  MOD_RES (2)..(2): Xaa is Aib
  MOD_RES (10)..(10): Covelently bound to C16 fatty acyl group via Ala-Ala spacer
  MOD_RES (16)..(16): Xaa is Aib
  MOD_RES (29)..(29): AMIDATION
HXQGTFTSDKSKYLDXRRAQDFVCWLMNT

SEQ ID NO: 916 - protein, 30 aa, Artificial Sequence; identical to SEQ ID NO: 581
  Synthetic peptide
  MOD_RES (2)..(2): D-serine, D-alanine, valine, amino n-butyric acid, glycine, N-methyl serine, aminoisobutyric acid
  MOD_RES (30)..(30): Acylated with a C14 fatty acyl group
  MOD_RES (30)..(30): AMIDATION

SEQ ID NO: 917 - protein, 29 aa, Artificial Sequence
  Synthetic peptide
  MOD_RES (2)..(2): D-serine, D-alanine, valine, amino n-butyric acid, glycine, N-methyl serine, aminoisobutyric acid
  MOD_RES (10)..(10): Acylated with a C14 fatty acyl group
  MOD_RES (29)..(29): AMIDATION
HXQGTFTSDKSKYLDERRAKDFVQWLMNT

SEQ ID NO: 918 - protein, 30 aa, Artificial Sequence; identical to SEQ ID NO: 581
  Synthetic peptide
  MOD_RES (2)..(2): D-serine, D-alanine, valine, amino n-butyric acid, glycine, N-methyl serine, aminoisobutyric acid
  MOD_RES (30)..(30): Acylated with a C16 fatty acyl group
  MOD_RES (30)..(30): AMIDATION

SEQ ID NO: 919 - protein, 29 aa, Artificial Sequence
  Synthetic peptide
  MOD_RES (2)..(2): D-serine, D-alanine, valine, amino n-butyric acid, glycine, N-methyl serine, aminoisobutyric acid
  MOD_RES (10)..(10): Acylated with a C16 fatty acyl group
  MOD_RES (29)..(29): AMIDATION
HXQGTFTSDKSKYLDERRAKDFVQWLMNT

SEQ ID NO: 920 - protein, 29 aa, Artificial Sequence
  Synthetic Polypeptide
  MISC_FEATURE: c-term amidation
  MOD_RES (1)..(1): (Des-amino)His
  MISC_FEATURE (12)..(16): Lactam ring between side chains at positions 12 and 16
XSQGTFTSDYSKYLDEQAAKEFIAWLMNT

SEQ ID NO: 921 - protein, 29 aa, Artificial Sequence
  Synthetic Polypeptide
  MISC_FEATURE: c-term amidation
  MOD_RES (1)..(1): (Des-amino)His
  MISC_FEATURE (16)..(20): Lactam ring between side chains at positions 16 and 20
XSQGTFTSDYSKYLDEQAAKEFIAWLMNT

SEQ ID NO: 922 - protein, 29 aa, Artificial Sequence
  Synthetic Polypeptide
  MISC_FEATURE: c-term amidation
  MOD_RES (1)..(1): (Des-amino)His
XSQGTFTSDYSKYLDEQAAKEFIAWLVKG

SEQ ID NO: 923 - protein, 29 aa, Artificial Sequence
  Synthetic Polypeptide
  MISC_FEATURE: c-term amidation
  MOD_RES (1)..(1): (Des-amino)His
  MISC_FEATURE (12)..(16): Lactam ring between side chains at positions 12 and 16
XSQGTFTSDYSKYLDEQAAKEFIAWLVKG

SEQ ID NO: 924 - protein, 29 aa, Artificial Sequence
  Synthetic Polypeptide
  MISC_FEATURE: c-term amidation
  MOD_RES (1)..(1): (Des-amino)His
  MISC_FEATURE (16)..(20): Lactam ring between side chains at positions 16 and 20
XSQGTFTSDYSKYLDEQAAKEFIAWLVKG

SEQ ID NO: 925 - protein, 29 aa, Artificial Sequence
  Synthetic Polypeptide
  MOD_RES (2)..(2): Aminoisobutyric acid
  MISC_FEATURE (29)..(29): c-term amidation
HXQGTFTSDYSKYLDERRAQDFVQWLMNT

SEQ ID NO: 926 - protein, 29 aa, Artificial Sequence
  Synthetic Polypeptide
  MISC_FEATURE: c-term amidation
  MOD_RES (2)..(2): Aminoisobutyric acid
  MISC_FEATURE (16)..(20): Lactam ring between side chains at positions 16 and 20
HXQGTFTSDYSKYLDERRAKDFVQWLMNT

SEQ ID NO: 927 - protein, 29 aa, Artificial Sequence
  Synthetic Polypeptide
  MISC_FEATURE: c-term amidation
  MOD_RES (2)..(2): Aminoisobutyric acid
  MISC_FEATURE (16)..(20): Lactam ring between side chains at positions 16 and 20
HXQGTFTSDYSKYLDERRAKDFVQWLMNT

SEQ ID NO: 928 - protein, 29 aa, Artificial Sequence
  Synthetic Polypeptide
  MISC_FEATURE: c-term amidation
  MOD_RES (2)..(2): Aminoisobutyric acid
  MISC_FEATURE (12)..(16): Lactam ring between side chains at positions 12 and 16
HXQGTFTSDYSKYLDERRAQDFVQWLMNT

SEQ ID NO: 929 - protein, 29 aa, Artificial Sequence
  Synthetic Polypeptide
  MISC_FEATURE: c-term amidation
  MOD_RES (2)..(2): Aminoisebutyric acid
  MISC_FEATURE (12)..(16): Lactam ring between side chains at positions 12 and 16
HXQGTFTSDYSKYLDERRAKDFVQWLMNT

SEQ ID NO: 930 - protein, 29 aa, Artificial Sequence
  Synthetic Polypeptide
  MISC_FEATURE: c-term amidation
  MOD_RES (2)..(2): Aminoisobutyric acid
  MISC_FEATURE (16)..(20): Lactam ring between side chains at positions 16 and 20
HXQGTFTSDYSKYLDKRRAEDFVQWLMNT

SEQ ID NO: 931 - protein, 29 aa, Artificial Sequence
  Synthetic Polypeptide
  MISC_FEATURE: c-term amidation
  MOD_RES (2)..(2): Aminoisobutyric acid
HXQGTFTSDYSKYLDERAAKDFVQWLMNT

SEQ ID NO: 932 - protein, 29 aa, Artificial Sequence
  Synthetic Polypeptide
  MISC_FEATURE: c-term amidation
  MOD_RES (2)..(2): Aminoisobutyric acid
  MISC_FEATURE (16)..(20): Lactam ring between side chains at positions 16 and 20
HXQGTFTSDYSKYLDERAAKDFVQWLMNT

SEQ ID NO: 933 - protein, 29 aa, Artificial Sequence
  Synthetic Polypeptide
  MISC_FEATURE: c-term amidation
  MOD_RES (2)..(2): Aminoisobutryic acid
  MISC_FEATURE (12)..(16): Lactam ring between side chains at positions 12 and 16
HXQGTFTSDYSKYLDERAAQDFVQWLMNT

SEQ ID NO: 934 - protein, 29 aa, Artificial Sequence
  glucagon analog
  MISC_FEATURE: c-term amidation
  MOD_RES (2)..(2): Aminoisobutryic acid
  MISC_FEATURE (12)..(16): Lactam ring between side chains at positions 12 and 16
HXQGTFTSDYSKYLDERAAKDFVQWLMNT

SEQ ID NO: 935 - protein, 29 aa, Artificial Sequence
  glucagon analog
  MISC_FEATURE: c-term amidation
  MOD_RES (2)..(2): Aminoisobutryic acid
  MISC_FEATURE (16)..(20): Lactam ring between side chains at positions 16 and 20
HXQGTFTSDYSKYLDKRAAEDFVQWLMNT

SEQ ID NO: 936 - protein, 29 aa, Artificial Sequence
  glucagon analog
  MISC_FEATURE: c-term amidation
  MOD_RES (2)..(2): Aminoisobutyric acid
HXQGTFTSDYSKYLDEQAAKEFIAWLMNT

SEQ ID NO: 937 - protein, 29 aa, Artificial Sequence
  glucagon analog
  MISC_FEATURE: c-term amidation
  MOD_RES (2)..(2): Aminoisobutryic acid
  MISC_FEATURE (12)..(16): Lactam ring between side chains at positions 12 and 16
HXQGTFTSDYSKYLDEQAAKEFIAWLMNT

SEQ ID NO: 938 - protein, 29 aa, Artificial Sequence
  glucagon analog
  MISC_FEATURE: c-term amidation
  MOD_RES (2)..(2): Aminoisobutryic acid
  MISC_FEATURE (16)..(20): Lactam ring between side chains at positions 16 and 20
HXQGTFTSDYSKYLDEQAAKEFIAWLMNT

SEQ ID NO: 939 - protein, 29 aa, Artificial Sequence
  glucagon analog
  MISC_FEATURE: c-term amidation
  MOD_RES (2)..(2): Aminoisobutyric acid
HXQGTFTSDYSKYLDEQAAKEFIAWLVKG

SEQ ID NO: 940 - protein, 29 aa, Artificial Sequence
  glucagon analog
  MISC_FEATURE: c-term amidation
  MOD_RES (2)..(2): Aminoisobutyric acid
  MISC_FEATURE (12)..(16): Lactam ring between side chains at positions 12 and 16
HXQGTFTSDYSKYLDEQAAKEFIAWLVKG

SEQ ID NO: 941 - protein, 29 aa, Artificial Sequence
  glucagon analog
  MISC_FEATURE: c-term amidation
  MOD_RES (2)..(2): Aminoisobutyric acid
  MISC_FEATURE (16)..(20): Lactam ring between side chains at positions 16 and 20
HXQGTFTSDYSKYLDEQAAKEFIAWLVKG

SEQ ID NO: 942 - protein, 29 aa, Artificial Sequence
  glucagon analog
  MISC_FEATURE: c-term amidation
  MOD_RES (2)..(2): D-Ala
HXQGTFTSDYSKYLDERRAQDFVQWLMNT

SEQ ID NO: 943 - protein, 29 aa, Artificial Sequence
  glucagon analog
  MISC_FEATURE: c-term amidation
  MOD_RES (2)..(2): D-Ala
HXQGTFTSDYSKYLDERRAKDFVQWLMNT

SEQ ID NO: 944 - protein, 29 aa, Artificial Sequence
  glucagon analog
  MISC_FEATURE: c-term amidation
  MOD_RES (2)..(2): D-Ala
  MISC_FEATURE (16)..(20): Lactam ring between side chains at positions 16 and 20
HXQGTFTSDYSKYLDERRAKDFVQWLMNT

SEQ ID NO: 945 - protein, 29 aa, Artificial Sequence
  glucagon analog
  MISC_FEATURE: c-term amidation
  MOD_RES (2)..(2): D-Ala
  MISC_FEATURE (12)..(16): Lactam ring between side chains at positions 12 and 16
HXQGTFTSDYSKYLDERRAQDFVQWLMNT

SEQ ID NO: 946 - protein, 29 aa, Artificial Sequence
  glucagon analog
  MISC_FEATURE: c-term amidation
  MOD_RES (2)..(2): D-Ala
  MISC_FEATURE (12)..(16): Lactam ring between side chains at positions 12 and 16
HXQGTFTSDYSKYLDERRAKDFVQWLMNT

SEQ ID NO: 947 - protein, 29 aa, Artificial Sequence
  glucagon analog
  MISC_FEATURE: c-term amidation
  MOD_RES (2)..(2): D-Ala
  MISC_FEATURE (16)..(20): Lactam ring between side chains at positions 16 and 20
HXQGTFTSDYSKYLDKRRAEDFVQWLMNT

SEQ ID NO: 948 - protein, 29 aa, Artificial Sequence
  glucagon analog
  MISC_FEATURE: c-term amidation
  MOD_RES (2)..(2): D-Ala
HXQGTFTSDYSKYLDERAAKDFVQWLMNT

SEQ ID NO: 949 - protein, 29 aa, Artificial Sequence
  glucagon analog
  MISC_FEATURE: c-term amidation
  MOD_RES (2)..(2): D-Ala
  MISC_FEATURE (16)..(20): Lactam ring between side chains at positions 16 and 20
HXQGTFTSDYSKYLDERAAKDFVQWLMNT

SEQ ID NO: 950 - protein, 29 aa, Artificial Sequence
  glucagon analog
  MISC_FEATURE: c-term amidation
  MOD_RES (2)..(2): D-Ala
  MISC_FEATURE (12)..(16): Lactam ring between side chains at positions 12 and 16
HXQGTFTSDYSKYLDERAAQDFVQWLMNT

SEQ ID NO: 951 - protein, 29 aa, Artificial Sequence
  glucagon analog
  MISC_FEATURE: c-term amidation
  MOD_RES (2)..(2): D-Ala
  MISC_FEATURE (12)..(16): Lactam ring between side chains at positions 12 and 16
HXQGTFTSDYSKYLDERAAKDFVQWLMNT

SEQ ID NO: 952 - protein, 29 aa, Artificial Sequence
  glucagon analog
  MISC_FEATURE: c-term amidation
  MOD_RES (2)..(2): D-Ala
  MISC_FEATURE (16)..(20): Lactam ring between side chains at positions 16 and 20
HXQGTFTSDYSKYLDKRAAEDFVQWLMNT

SEQ ID NO: 953 - protein, 29 aa, Artificial Sequence
  glucagon analog
  MISC_FEATURE: c-term amidation
  MOD_RES (2)..(2): D-Ala
HXQGTFTSDYSKYLDEQAAKEFIAWLMNT

SEQ ID NO: 954 - protein, 29 aa, Artificial Sequence
  glucagon analog
  MISC_FEATURE: c-term amidation
  MOD_RES (2)..(2): D-Ala
  MISC_FEATURE (12)..(16): Lactam ring between side chains at positions 12 and 16
HXQGTFTSDYSKYLDEQAAKEFIAWLMNT

SEQ ID NO: 955 - protein, 29 aa, Artificial Sequence
  glucagon analog
  MISC_FEATURE: c-term amidation
  MOD_RES (2)..(2): D-Ala
  MISC_FEATURE (16)..(20): Lactam ring between side chains at positions 16 and 20
HXQGTFTSDYSKYLDEQAAKEFIAWLMNT

SEQ ID NO: 956 - protein, 29 aa, Artificial Sequence
  glucagon analog
  MISC_FEATURE: c-term amidation
  MOD_RES (2)..(2): D-Ala
HXQGTFTSDYSKYLDEQAAKEFIAWLVKG

SEQ ID NO: 957 - protein, 29 aa, Artificial Sequence
  glucagon analog
  MISC_FEATURE: c-term amidation
  MOD_RES (2)..(2): D-Ala
  MISC_FEATURE (12)..(16): Lactam ring between side chains at positions 12 and 16
HXQGTFTSDYSKYLDEQAAKEFIAWLVKG

SEQ ID NO: 958 - protein, 29 aa, Artificial Sequence
  glucagon analog
  MISC_FEATURE: c-term amidation
  MOD_RES (2)..(2): D-Ala
  MISC_FEATURE (16)..(20): Lactam ring between side chains at positions 16 and 20
HXQGTFTSDYSKYLDEQAAKEFIAWLVKG

SEQ ID NO: 959 - protein, 29 aa, Artificial Sequence
  glucagon analog
  MISC_FEATURE: c-term amidation
HSEGTFTSDYSKYLDERRAQDFVQWLMNT

SEQ ID NO: 960 - protein, 29 aa, Artificial Sequence
  glucagon analog
  MISC_FEATURE: c-term amidation
HSEGTFTSDYSKYLDERRAKDFVQWLMNT

SEQ ID NO: 961 - protein, 29 aa, Artificial Sequence
  glucagon analog
  MISC_FEATURE: c-term amidation
  MISC_FEATURE (16)..(20): Lactam ring between side chains at positions 16 and 20
HSEGTFTSDYSKYLDERRAKDFVQWLMNT

SEQ ID NO: 962 - protein, 29 aa, Artificial Sequence
  glucagon analog
  MISC_FEATURE: c-term amidation
  MISC_FEATURE (12)..(16): Lactam ring between side chains at positions 12 and 16
HSEGTFTSDYSKYLDERRAQDFVQWLMNT

SEQ ID NO: 963 - protein, 29 aa, Artificial Sequence
  glucagon analog
  MISC_FEATURE: c-term amidation
HSEGTFTSDYSKYLDERAAKDFVQWLMNT

SEQ ID NO: 964 - protein, 29 aa, Artificial Sequence
  glucagon analog
  MISC_FEATURE: c-term amidation
  MISC_FEATURE (16)..(20): Lactam ring between side chains at positions 16 and 20
HSEGTFTSDYSKYLDERAAKDFVQWLMNT

SEQ ID NO: 965-1000 - skipped (36 entries)

SEQ ID NO: 1001 - protein, 29 aa, Homo sapiens
  MISC_FEATURE: Wild type glucagon
HSQGTFTSDYSKYLDSRRAQDFVQWLMNT

SEQ ID NO: 1002 - protein, 31 aa, Homo sapiens; identical to SEQ ID NO: 703
  MISC_FEATURE (1)..(31): GLP-1(7-37)

SEQ ID NO: 1003 - protein, 30 aa, Artificial sequence; identical to SEQ ID NO: 704
  Synthetic polypeptide
  MISC_FEATURE (1)..(30): GLP-1(7-36) amidated
  MISC_FEATURE (30)..(30): C-terminal amidation

SEQ ID NO: 1004 - protein, 42 aa, Homo sapiens; identical to SEQ ID NO: 707
  mat_peptide (1)..(42): gastric inhibitory polypeptide

SEQ ID NO: 1005 - protein, 29 aa, Artificial sequence
  Synthetic polypeptide
  MISC_FEATURE: Analog 61
  MISC_FEATURE (16)..(20): Lactam bridge between residues 16 and 20.
HSQGTFTSDYSKYLDEIHQKEFIAWLMNT

SEQ ID NO: 1006 - protein, 29 aa, Artificial sequence
  Synthetic polypeptide
  MISC_FEATURE: Analog 62
  MISC_FEATURE (16)..(20): Lactam bridge between residues 16 and 20.
HSQGTFTSDYSIYLDEIHQKEFIAWLMNT

SEQ ID NO: 1007 - protein, 29 aa, Artificial sequence
  Synthetic polypeptide
  MISC_FEATURE: Analog 63
  MISC_FEATURE (12)..(16): Lactam bridge between residues 12 and 16.
HSQGTFTSDYSKYLDEIHQKEFIAWLMNT

SEQ ID NO: 1008 - protein, 29 aa, Artificial sequence
  Synthetic polypeptide
  MISC_FEATURE: Analog 66
HSQGTFTSDYSKYLDEIHQKEFIAWLLAQ

SEQ ID NO: 1009 - protein, 29 aa, Artificial sequence
  Synthetic polypeptide
  MISC_FEATURE: Analog 68
HSQGTFTSDYSKYLDKIHQEEFIAWLMNT

SEQ ID NO: 1010 - protein, 29 aa, Artificial sequence
  Synthetic polypeptide
  MISC_FEATURE: Analog 69
  MISC_FEATURE (16)..(20): Lactam bridge between residues 16 and 20
HSQGTFTSDYSKYLDKIHQEEFIAWLMNT

SEQ ID NO: 1011 - protein, 29 aa, Artificial sequence
  Synthetic polypeptide
  MISC_FEATURE: Analog 84
  MISC_FEATURE (16)..(20): Lactam bridge between residues 16 and 20
HSQGTFTSDYSIYLDEIHQKEFICWLLAQ

SEQ ID NO: 1012 - protein, 29 aa, Artificial sequence
  Synthetic polypeptide
  MISC_FEATURE: Analog 85
  MISC_FEATURE (16)..(20): Lactam bridge between residues 16 and 20
  MISC_FEATURE (24)..(24): PEG (20kDa) covalently attached to Cysteine
HSQGTFTSDYSIYLDEIHQKEFICWLLAQ

SEQ ID NO: 1013 - protein, 29 aa, Artificial sequence
  Synthetic polypeptide
  MISC_FEATURE: Analog 92
HSQGTFTSDYSIYLDEKHQKEFIAWLLAQ

SEQ ID NO: 1014 - protein, 29 aa, Artificial sequence
  Synthetic polypeptide
  MISC_FEATURE: Analog 93
  MISC_FEATURE (16)..(20): Lactam bridge between residues 16 and 20
  MISC_FEATURE (17)..(21): Lactam bridge between residues 17 and 21
HSQGTFTSDYSIYLDEKHQKEFIAWLLAQ

SEQ ID NO: 1015 - protein, 29 aa, Artificial sequence
  Synthetic polypeptide
  MISC_FEATURE: Analog 95
  MISC_FEATURE (16)..(20): Lactam bridge between residues 16 and 20
HAEGTFISDYSIAMDEIHQKDFVNWLLAQ

SEQ ID NO: 1016 - protein, 29 aa, Artificial sequence
  Synthetic polypeptide
  MISC_FEATURE: Analog 96
  MISC_FEATURE (16)..(20): Lactam bridge between residues 16 and 20
YAEGTFISDYSIAMDEIHQKDFVNWLLAQ

SEQ ID NO: 1017 - protein, 29 aa, Artificial sequence
  Synthetic polypeptide
  MISC_FEATURE: Analog 97
  MISC_FEATURE (16)..(20): Lactam bridge between residues 16 and 20
HAEGTFTSDYSIYMDEIHQKDFVNWLLAQ

SEQ ID NO: 1018 - protein, 29 aa, Artificial sequence
  Synthetic polypeptide
  MISC_FEATURE: Analog 98
  MISC_FEATURE (16)..(20): Lactam bridge between residues 16 and 20
YAEGTFTSDYSIYMDEIHQKDFVNWLLAQ

SEQ ID NO: 1019 - protein, 42 aa, Artificial sequence
  Synthetic polypeptide
  MISC_FEATURE: Analog 99
YAEGTFISDYSIAMDKIHQQDFVNWLLAQKGKKNWLKHNITQ

SEQ ID NO: 1020 - protein, 42 aa, Artificial sequence
  Synthetic polypeptide
  MISC_FEATURE: Analog 100
  MOD_RES (2)..(2): Xaa is Aib
YXEGTFISDYSIAMDKIHQQDFVNWLLAQKGKKNWLKHNITQ

SEQ ID NO: 1021 - protein, 42 aa, Artificial sequence
  Synthetic polypeptide
  MISC_FEATURE: Analog 101
YAPGTFISDYSIAMDKIHQQDFVNWLLAQKGKKNWLKHNITQ

SEQ ID NO: 1022 - protein, 42 aa, Artificial sequence
  Synthetic polypeptide
  MISC_FEATURE: Analog 102
  MOD_RES (2)..(2): Xaa is Aib
YXEGTFISDYSIAMDKIHQQDFVCWLLAQKGKKNWLKHNITQ

SEQ ID NO: 1023 - protein, 42 aa, Artificial sequence
  Synthetic polypeptide
  MISC_FEATURE: Analog 104
YAPGTFISDYSIAMDKIHQQDFVCWLLAQKGKKNWLKHNITQ

SEQ ID NO: 1024 - protein, 42 aa, Artificial sequence; identical to SEQ ID NO: 1023
  Synthetic polypeptide
  MISC_FEATURE: Analog 105
  MISC_FEATURE (24)..(24): PEG (40kDa) attached to Cysteine

SEQ ID NO: 1025 - protein, 29 aa, Artificial sequence
  Synthetic polypeptide
  MISC_FEATURE: Analog 106
YAEGTFISDYSIAMDKIHQQDFVNWLLAQ

SEQ ID NO: 1026 - protein, 29 aa, Artificial sequence
  Synthetic polypeptide
  MISC_FEATURE: Analog 107
  MISC_FEATURE (16)..(20): Lactam bridge between residues 16 and 20
HSQGTFISDYSKYLDEIHQKEFIAWLMNT

SEQ ID NO: 1027 - protein, 29 aa, Artificial sequence
  Synthetic polypeptide
  MISC_FEATURE: Analog 108
  MISC_FEATURE (16)..(20): Lactam bridge between residues 16 and 20
HSQGTFISDYSKALDEIHQKEFIAWLMNT

SEQ ID NO: 1028 - protein, 29 aa, Artificial sequence
  Synthetic polypeptide
  MISC_FEATURE: Analog 109
  MISC_FEATURE (16)..(20): Lactam bridge between residues 16 and 20
YSQGTFTSDYSKYLDEIHQKDFVNWLLAQ

SEQ ID NO: 1029 - protein, 29 aa, Artificial sequence
  Synthetic polypeptide
  MISC_FEATURE: Analog 110
  MISC_FEATURE (16)..(20): Lactam bridge between residues 16 and 20
YSQGTFTSDYSIYLDEIHQKDFVNWLLAQ

SEQ ID NO: 1030 - protein, 29 aa, Artificial sequence
  Synthetic polypeptide
  MISC_FEATURE: Analog 111
  MISC_FEATURE (16)..(20): Lactam bridge between residues 16 and 20
HSQGTFTSDYSKYLDEIHQKDFVNWLLAQ

SEQ ID NO: 1031 - protein, 24 aa, Artificial sequence
  Synthetic polypeptide
  MISC_FEATURE: Analog 113
  MOD_RES (1)..(1): Xaa is 3-phenyllactic acid
  MISC_FEATURE (11)..(15): Lactam bridge between residues 11 and 15
XISDYSIAMDEIHQKDFVNWLLAQ

SEQ ID NO: 1032 - protein, 24 aa, Artificial sequence
  Synthetic polypeptide
  MISC_FEATURE: Analog 114
  MOD_RES (1)..(1): Xaa is 3-phenyllactic acid
  MISC_FEATURE (11)..(15): Lactam bridge between residues 11 and 15
XTSDYSKYLDEIHQKDFVNWLLAQ

SEQ ID NO: 1033 - protein, 39 aa, Artificial sequence
  Synthetic polypeptide
  MISC_FEATURE: Analog 115
  MISC_FEATURE (16)..(20): Lactam bridge between residues 16 and 20
HSQGTFTSDYSKYLDEIHQKDFVNWLLAGGPSSGAPPPS

SEQ ID NO: 1034 - protein, 39 aa, Artificial sequence
  Synthetic polypeptide
  MISC_FEATURE: Analog 116
  MISC_FEATURE (16)..(20): Lactam bridge between residues 16 and 20
YSQGTFTSDYSKYLDEIHQKDFVNWLLAGGPSSGAPPPS

SEQ ID NO: 1035 - protein, 29 aa, Artificial sequence
  Synthetic polypeptide
  MISC_FEATURE: Analog 118
  MISC_FEATURE (16)..(20): Lactam bridge between residues 16 and 20
YSQGTFTSDYSKYLDEIHQKEFVNWLLAQ

SEQ ID NO: 1036 - protein, 39 aa, Artificial sequence
  Synthetic polypeptide
  MISC_FEATURE: Analog 120
  MISC_FEATURE (16)..(20): Lactam bridge between residues 16 and 20
YSQGTFTSDYSKYLDEQAAKEFIAWLMNGGPSSGAPPPS

SEQ ID NO: 1037 - protein, 29 aa, Artificial sequence
  Synthetic polypeptide
  MISC_FEATURE: Analog 124
  MISC_FEATURE (16)..(20): Lactam bridge between residues 16 and 20
HSQGTFTSDYSIYMDEIHQKDFVNWLLAQ

SEQ ID NO: 1038 - protein, 29 aa, Artificial sequence
  Synthetic polypeptide
  MISC_FEATURE: Analog 125
  MISC_FEATURE (16)..(20): Lactam bridge between residues 16 and 20
YSQGTFTSDYSIYMDEIHQKDFVNWLLAQ

SEQ ID NO: 1039 - protein, 39 aa, Artificial sequence
  Synthetic polypeptide
  MISC_FEATURE: Analog 127
  MISC_FEATURE (16)..(20): Lactam bridge between residues 16 and 20
YSQGTFTSDYSKYLDEQAAKEFVNWLLAGGPSSGAPPPS

SEQ ID NO: 1040 - protein, 39 aa, Artificial sequence
  Synthetic polypeptide
  MISC_FEATURE: Analog 128
  MISC_FEATURE (16)..(20): Lactam bridge between residues 16 and 20
HSQGTFTSDYSKYLDEIHQKDFIAWLMNGGPSSGAPPPS

SEQ ID NO: 1041 - protein, 39 aa, Artificial sequence
  Synthetic polypeptide
  MISC_FEATURE: Analog 129
  MISC_FEATURE (16)..(20): Lactam bridge between residues 16 and 20
YSQGTFTSDYSKYLDEIHQKDFIAWLMNGGPSSGAPPPS

SEQ ID NO: 1042 - protein, 39 aa, Artificial sequence
  Synthetic polypeptide
  MISC_FEATURE: Analog 139
  MISC_FEATURE (16)..(20): Lactam bridge between residues 16 and 20
YSQGTFTSDYSKYLDEQAAKEFIAWLLAGGPSSGAPPPS

SEQ ID NO: 1043 - protein, 39 aa, Artificial sequence
  Synthetic polypeptide
  MISC_FEATURE: Analog 140
  MISC_FEATURE (16)..(20): Lactam bridge between residues 16 and 20
YSQGTFTSDYSIYLDEQAAKEFVNWLLAGGPSSGAPPPS

SEQ ID NO: 1044 - protein, 39 aa, Artificial sequence
  Synthetic polypeptide
  MISC_FEATURE: Analog 141
  MISC_FEATURE (16)..(20): Lactam bridge between residuess 16 and 20
YSQGTFTSDYSKYMDEQAAKEFVNWLLAGGPSSGAPPPS

SEQ ID NO: 1045 - protein, 39 aa, Artificial sequence
  Synthetic polypeptide
  MISC_FEATURE: Analog 142
  MISC_FEATURE (16)..(20): Lactam bridge between residues 16 and 20
YAEGTFTSDYSIYMDEQAAKEFVNWLLAGGPSSGAPPPS

SEQ ID NO: 1046 - protein, 39 aa, Artificial sequence
  Synthetic polypeptide
  MISC_FEATURE: Analog 143
  MISC_FEATURE (16)..(20): Lactam bridge between residues 16 and 20
YSQGTFTSDYSKYLDERRAKEFVNWLLAGGPSSGAPPPS

SEQ ID NO: 1047 - protein, 39 aa, Artificial sequence
  Synthetic polypeptide
  MISC_FEATURE: Analog 144
  MISC_FEATURE (16)..(20): Lactam bridge between residues 16 and 20
YAQGTFTSDYSIYMDEQAAKEFVNWLLAGGPSSGAPPPS

SEQ ID NO: 1048 - protein, 39 aa, Artificial sequence
  Synthetic polypeptide
  MISC_FEATURE: Analog 145
  MISC_FEATURE (16)..(20): Lactam bridge between residues 16 and 20
YAQGTFISDYSKYLDEQAAKEFVNWLLAGGPSSGAPPPS

SEQ ID NO: 1049 - protein, 39 aa, Artificial sequence; identical to SEQ ID NO: 1048
  Synthetic polypeptide
  MISC_FEATURE: Analog 146
  MISC_FEATURE (16)..(20): Lactam bridge between residues 16 and 20

SEQ ID NO: 1050 - protein, 39 aa, Artificial sequence
  Synthetic polypeptide
  MISC_FEATURE: Analog 147
  MISC_FEATURE (16)..(20): Lactam bridge between residues 16 and 20
YSQGTFTSDYSIYLDEQAAKEFIAWLLAGGPSSGAPPPS

SEQ ID NO: 1051 - protein, 39 aa, Artificial sequence
  Synthetic polypeptide
  MISC_FEATURE: Analog 148
  MISC_FEATURE (16)..(20): Lactam bridge between residues 16 and 20
YSEGTFTSDYSIYLDEQAAKEFIAWLLAGGPSSGAPPPS

SEQ ID NO: 1052 - protein, 39 aa, Artificial sequence
  Synthetic polypeptide
  MISC_FEATURE: Analog 149
  MISC_FEATURE (16)..(20): Lactam bridge between residues 16 and 20
YAEGTFTSDYSIYLDEQAAKEFVNWLLAGGPSSGAPPPS

SEQ ID NO: 1053 - protein, 39 aa, Artificial sequence
  Synthetic polypeptide
  MISC_FEATURE: Analog 150
  MISC_FEATURE (16)..(20): Lactam bridge between residues 16 and 20
YSQGTFISDYSIYLDEQAAKEFVNWLLAGGPSSGAPPPS

SEQ ID NO: 1054 - protein, 39 aa, Artificial sequence; identical to SEQ ID NO: 1042
  Synthetic polypeptide
  MISC_FEATURE: Analog 151
  MISC_FEATURE (16)..(20): Lactam bridge between residues 16 and 20

SEQ ID NO: 1055 - protein, 39 aa, Artificial sequence
  Synthetic polypeptide
  MISC_FEATURE: Analog 152
  MOD_RES (2)..(2): Xaa is Aib
  MISC_FEATURE (16)..(20): Lactam bridge between residues 16 and 20
YXQGTFTSDYSIYLDEQAAKEFVNWLLAGGPSSGAPPPS

SEQ ID NO: 1056 - protein, 39 aa, Artificial sequence
  Synthetic polypeptide
  MISC_FEATURE: Analog 154
  MOD_RES (1)..(1): Xaa is hippuric acid
  MISC_FEATURE (16)..(20): Lactam bridge between residues 16 and 20
XSQGTFTSDYSIYLDEQAAKEFVNWLLAGGPSSGAPPPS

SEQ ID NO: 1057 - protein, 39 aa, Artificial sequence; identical to SEQ ID NO: 1039
  Synthetic polypeptide
  MISC_FEATURE: Analog 155
  MISC_FEATURE (12)..(16): Lactam bridge between residues 12 and 16

SEQ ID NO: 1058 - protein, 39 aa, Artificial sequence
  Synthetic polypeptide
  MISC_FEATURE: Analog 156
  MISC_FEATURE (20)..(24): Lactam bridge between residues 20 and 24
YSQGTFTSDYSIYLDEQAAKEFVEWLLAGGPSSGAPPPS

SEQ ID NO: 1059 - protein, 39 aa, Artificial sequence
  Synthetic polypeptide
  MISC_FEATURE: Analog 157
  MISC_FEATURE (24)..(28): Lactam bridge between residues 24 and 28
YSQGTFTSDYSIYLDEQAAKEFVEWLLKGGPSSGAPPPS

SEQ ID NO: 1060 - protein, 39 aa, Artificial sequence
  Synthetic polypeptide
  MISC_FEATURE: Analog 158
  MOD_RES (2)..(2): Xaa is Aib
  MISC_FEATURE (16)..(20): Lactam bridge between residues 16 and 20
YXQGTFTSDYSIYLDEQAAKEFVCWLLAGGPSSGAPPPS

SEQ ID NO: 1061 - protein, 39 aa, Artificial sequence
  Synthetic polypeptide
  MISC_FEATURE: Analog 162
  MOD_RES (2)..(2): Xaa is Aib
  MISC_FEATURE (16)..(20): Lactam bridge between residues 16 and 20
YXQGTFTSDYSYYLDEQAVKEFVNWLIAGGPSSGAPPPS

SEQ ID NO: 1062 - protein, 29 aa, Artificial sequence
  Synthetic polypeptide
  MISC_FEATURE: Analog 163
  MISC_FEATURE (16)..(20): Lactam bridge between residues 16 and 20
YSQGTFTSDYSIYLDEQAAKEFVNWLLAG

SEQ ID NO: 1063 - protein, 29 aa, Artificial sequence
  Synthetic polypeptide
  MISC_FEATURE: Analog 164
  MOD_RES (2)..(2): Xaa is Aib
  MISC_FEATURE (16)..(20): Lactam bridge between residues 16 and 20
YXQGTFTSDYSIYLDEQAAKEFVNWLLAG

SEQ ID NO: 1064 - protein, 40 aa, Artificial sequence
  Synthetic polypeptide
  MISC_FEATURE: Analog 165
  MOD_RES (2)..(2): Xaa is Aib
  MISC_FEATURE (16)..(20): Lactam bridge between residues 16 and 20
YXQGTFTSDYSIYLDEQAAKEFVNWLLAGGPSSGAPPPSC

SEQ ID NO: 1065 - protein, 40 aa, Artificial sequence; identical to SEQ ID NO: 1064
  Synthetic polypeptide
  MISC_FEATURE: Analog 166
  MOD_RES (2)..(2): Xaa is d-alanine
  MISC_FEATURE (16)..(20): Lactam bridge between residues 16 and 20

SEQ ID NO: 1066 - protein, 39 aa, Artificial sequence
  Synthetic polypeptide
  MISC_FEATURE: Analog 167
  MISC_FEATURE (17)..(20): Lactam bridge between residues 17 and 20
YSQGTFTSDYSIYLDEEAAKEFVNWLLAGGPSSGAPPPS

SEQ ID NO: 1067 - protein, 39 aa, Artificial sequence
  Synthetic polypeptide
  MISC_FEATURE: Analog 168
  MISC_FEATURE (18)..(21): Lactam bridge between residues 18 and 21
YSQGTFTSDYSIYLDEQKAKEFVNWLLAGGPSSGAPPPS

SEQ ID NO: 1068 - protein, 29 aa, Artificial sequence
  Synthetic polypeptide
  MISC_FEATURE: Analog 169
  MOD_RES (2)..(2): Xaa is Aib
  MISC_FEATURE (16)..(20): Lactam bridge between residues 16 and 20
YXQGTFTSDYSIYLDEQAAKEFVCWLLAG

SEQ ID NO: 1069 - protein, 40 aa, Artificial sequence; identical to SEQ ID NO: 1064
  Synthetic polypeptide
  MISC_FEATURE: Analog 170
  MOD_RES (2)..(2): Xaa is Aib
  MISC_FEATURE (16)..(20): Lactam bridge between residues 16 and 20
  MISC_FEATURE (40)..(40): PEG (40kDa) covalently attached to Cysteine

SEQ ID NO: 1070 - protein, 29 aa, Artificial sequence
  Synthetic polypeptide
  MISC_FEATURE: Analog 172
  MOD_RES (2)..(2): Xaa is Aib
  MISC_FEATURE (16)..(20): Lactam bridge between residues 16 and 20
  MISC_FEATURE (24)..(24): PEG (40kDa) covalently attached to Cysteine
YXQGTFTSDYSIYLDEQAAKEFVCWLLAG

SEQ ID NO: 1071 - protein, 40 aa, Artificial sequence; identical to SEQ ID NO: 761
  Synthetic polypeptide
  MISC_FEATURE: Analog 174
  MOD_RES (2)..(2): Xaa is Aib
  MISC_FEATURE (16)..(20): Lactam bridge between residues 16 and 20

SEQ ID NO: 1072 - protein, 39 aa, Artificial sequence; identical to SEQ ID NO: 1060
  Synthetic polypeptide
  MISC_FEATURE: Analog 175
  MOD_RES (2)..(2): Xaa is Aib
  MISC_FEATURE (16)..(20): Lactam bridge between residues 16 and 20
  MISC_FEATURE (24)..(24): PEG (40kDa) covalently attached to Cysteine

SEQ ID NO: 1073 - protein, 40 aa, Artificial sequence
  Synthetic polypeptide
  MISC_FEATURE: Analog 176
  MOD_RES (2)..(2): Xaa is Aib
  MISC_FEATURE (16)..(20): Lactam bridge between residues 16 and 20
YXQGTFISDYSIYLDEQAAKEFVNWLLAGGPSSGAPPPSC

SEQ ID NO: 1074 - protein, 29 aa, Artificial sequence
  Synthetic polypeptide
  MISC_FEATURE: Analog 177
  MOD_RES (2)..(2): Xaa is Aib
  MISC_FEATURE (16)..(20): Lactam bridge between residues 16 and 20
YXQGTFISDYSIYLDEQAAKEFVCWLLAG

SEQ ID NO: 1075 - protein, 40 aa, Artificial sequence; identical to SEQ ID NO: 761
  Synthetic polypeptide
  MISC_FEATURE: Analog 178
  MOD_RES (2)..(2): Xaa is Aib
  MISC_FEATURE (16)..(20): Lactam bridge between residues 16 and 20
  MISC_FEATURE (40)..(40): PEG (40kDa) covalently attached to Cysteine

SEQ ID NO: 1076 - protein, 29 aa, Artificial sequence
  Synthetic polypeptide
  MISC_FEATURE: Analog 179
  MOD_RES (2)..(2): Xaa is Aib
  MISC_FEATURE (16)..(20): Lactam bridge between residues 16 and 20
  MISC_FEATURE (24)..(24): PEG (40kDa) covalently attached to Cysteine
YXQGTFISDYSIYLDEQAAKEFVCWLLAG

SEQ ID NO: 1077 - protein, 40 aa, Artificial sequence; identical to SEQ ID NO: 1073
  Synthetic polypeptide
  MISC_FEATURE: Analog 182
  MOD_RES (2)..(2): Xaa is Aib
  MISC_FEATURE (16)..(20): Lactam bridge between residues 16 and 20
  MISC_FEATURE (40)..(40): PEG (40kDa) covalently attached to Cysteine

SEQ ID NO: 1078 - protein, 29 aa, Artificial sequence
  Synthetic polypeptide
  MISC_FEATURE: Analog 186
  MOD_RES (2)..(2): Xaa is Aib
  MISC_FEATURE (16)..(20): Lactam bridge between residues 16 and 20
  MISC_FEATURE (24)..(24): PEG (40kDa) covalently attached to Cysteine
YXQGTFTSDYSIYLDEQAAKEFVCWLMNG

SEQ ID NO: 1079 - protein, 39 aa, Artificial sequence; identical to SEQ ID NO: 1055
  Synthetic polypeptide
  MISC_FEATURE: Analog 191
  MOD_RES (2)..(2): Xaa is Aib

SEQ ID NO: 1080 - protein, 34 aa, Artificial sequence
  Synthetic polypeptide
  MISC_FEATURE: Analog 192
FTSDYSIYLDEQAAKEFVNWLLAGGPSSGAPPPS

SEQ ID NO: 1081 - protein, 38 aa, Artificial sequence
  Synthetic polypeptide
  MISC_FEATURE: Analog 194
  MOD_RES (1)..(1): Xaa is Aib
XQGTFTSDYSIYLDEEAVRLFVNWLLAGGPSSGAPPPS

SEQ ID NO: 1082 - protein, 26 aa, Artificial sequence
  Synthetic polypeptide
  MISC_FEATURE: Analog 197
  MISC_FEATURE (13)..(17): Lactam bridge between residues 13 and 17
GTFTSDYSIYLDEQAAKEFVNWLLAG

SEQ ID NO: 1083 - protein, 28 aa, Artificial sequence
  Synthetic polypeptide
  MISC_FEATURE: Analog 198
  MOD_RES (1)..(1): Xaa is Aib
  MISC_FEATURE (15)..(19): Lactam bridge between residues 15 and 19
XQGTFTSDYSIYLDEQAAKEFVNWLLAG

SEQ ID NO: 1084 - protein, 40 aa, Artificial sequence
  Synthetic polypeptide
  MISC_FEATURE: Analog 199
  MOD_RES (2)..(2): Xaa is Aib
  MISC_FEATURE (16)..(20): Lactam bridge between residues 16 and 20
YXQGTFVSDYSIYLDEQAAKEFVNWLLAGGPSSGAPPPSC

SEQ ID NO: 1085 - protein, 40 aa, Artificial sequence
  Synthetic polypeptide
  MISC_FEATURE: Analog 200
  MOD_RES (2)..(2): Xaa is Aib
  MISC_FEATURE (16)..(20): Lactam bridge between residues 16 and 20
  MOD_RES (27)..(27): Xaa is Nle
YXQGTFTSDYSIYLDEQAAKEFVNWLXAGGPSSGAPPPSC

SEQ ID NO: 1086 - protein, 39 aa, Artificial sequence
  Synthetic polypeptide
  MISC_FEATURE: Analog 201
  MOD_RES (2)..(2): Xaa is Aib
YXQGTFTSDYSIYLDEEAVRLFVNWLLAGGPSSGAPPPS

SEQ ID NO: 1087 - protein, 40 aa, Artificial sequence; identical to SEQ ID NO: 1084
  Synthetic polypeptide
  MISC_FEATURE: Analog 202
  MOD_RES (2)..(2): Xaa is Aib
  MISC_FEATURE (16)..(20): Lactam bridge between residues 16 and 20
  MISC_FEATURE (40)..(40): PEG (40kDa) covalently attached to Cysteine

SEQ ID NO: 1088 - protein, 40 aa, Artificial sequence; identical to SEQ ID NO: 1085
  Synthetic polypeptide
  MISC_FEATURE: Analog 203
  MOD_RES (2)..(2): Xaa is Aib
  MISC_FEATURE (16)..(20): Lactam bridge between residues 16 and 20
  MOD_RES (27)..(27): Xaa is Nle
  MISC_FEATURE (40)..(40): PEG (40kDa) covalently attached to Cysteine

SEQ ID NO: 1089 - protein, 40 aa, Artificial sequence
  Synthetic polypeptide
  MISC_FEATURE: Analog 204
  MOD_RES (2)..(2): Xaa is Aib
  MISC_FEATURE (16)..(20): Lactam bridge between residues 16 and 20
YXEGTFTSDYSIYLDEQAAKEFVNWLLAGRPSSGAPPPSC

SEQ ID NO: 1090 - protein, 40 aa, Artificial sequence; identical to SEQ ID NO: 1089
  Synthetic polypeptide
  MISC_FEATURE: Analog 205
  MOD_RES (2)..(2): Xaa is Aib
  MISC_FEATURE (16)..(20): Lactam bridge between residues 16 and 20
  MISC_FEATURE (40)..(40): PEG (40kDa) covalently attached to Cysteine

SEQ ID NO: 1091 - protein, 43 aa, Artificial sequence
  Synthetic polypeptide
  MISC_FEATURE: Analog 206
  MOD_RES (2)..(2): Xaa is Aib
  MISC_FEATURE (16)..(20): Lactam bridge between residues 16 and 20
YXEGTFTSDYSIYLDEQAAKEFVNWLLAGKGKKNWLKHNITQC

SEQ ID NO: 1092 - protein, 43 aa, Artificial sequence
  Synthetic polypeptide
  MISC_FEATURE: Analog 207
  MOD_RES (2)..(2): Xaa is Aib
  MISC_FEATURE (16)..(20): Lactam bridge between residues 16 and 20
YXQGTFTSDYSIYLDEQAAKEFVNWLLAGKGKKNWLKHNITQC

SEQ ID NO: 1093 - protein, 43 aa, Artificial sequence; identical to SEQ ID NO: 1091
  Synthetic polypeptide
  MISC_FEATURE: Analog 208
  MOD_RES (2)..(2): Xaa is Aib
  MISC_FEATURE (16)..(20): Lactam bridge between residues 16 and 20
  MISC_FEATURE (43)..(43): PEG (40kDa) covalently attached to Cysteine

SEQ ID NO: 1094 - protein, 40 aa, Artificial sequence
  Synthetic polypeptide
  MISC_FEATURE: Analog 209
  MOD_RES (2)..(2): Xaa is Aib
  MISC_FEATURE (9)..(12): Lactam bridge between residues 9 and 12
  MISC_FEATURE (16)..(20): Lactam bridge between residues 16 and 20
YXQGTFTSEYSKYLDEQAAKEFVNWLLAGGPSSGAPPPSC

SEQ ID NO: 1095 - protein, 10 aa, Artificial sequence
  Synthetic polypeptide
  MISC_FEATURE: CEX
GPSSGAPPPS

SEQ ID NO: 1096 - protein, 11 aa, Artificial sequence
  Synthetic polypeptide
  MISC_FEATURE (1)..(1): Xaa is any amino acid
XGPSSGAPPPS

SEQ ID NO: 1097 - protein, 8 aa, Artificial sequence
  Synthetic polypeptide
KRNRNNIA

SEQ ID NO: 1098 - protein, 4 aa, Artificial sequence
  Synthetic polypeptide
KRNR

SEQ ID NO: 1099 - protein, 40 aa, Artificial Sequence; identical to SEQ ID NO: 760
  Synthetic polypeptide
  MOD_RES (2)..(2): Xaa is Aib
  MOD_RES (20)..(20): Xaa is Aib
  MISC_FEATURE (40)..(40): PEG (40kDa) covalently attached to Cysteine
  MISC_FEATURE (40)..(40): C-terminal amidation

SEQ ID NO: 1100 - protein, 40 aa, Artificial Sequence; identical to SEQ ID NO: 759
  Synthetic polypeptide
  MOD_RES (2)..(2): Xaa is Aib
  MOD_RES (20)..(20): Xaa is Aib
  MISC_FEATURE (24)..(24): PEG (40kDa) covalently attached to Cysteine
  MISC_FEATURE (40)..(40): C-terminal amidation

SEQ ID NO: 1101 - protein, 40 aa, Artificial Sequence; identical to SEQ ID NO: 759
  Synthetic polypeptide
  MOD_RES (2)..(2): Xaa is Aib
  MOD_RES (20)..(20): Xaa is Aib
  MISC_FEATURE (24)..(24): PEG (40kDa) covalently attached to Cysteine
  MISC_FEATURE (40)..(40): 16 Carbon fatty acyl group covalently attached to Lysine
  MISC_FEATURE (40)..(40): C-terminal amidation

SEQ ID NO: 1102 - protein, 40 aa, Artificial Sequence; identical to SEQ ID NO: 759
  Synthetic polypeptide
  MOD_RES (2)..(2): Xaa is Aib
  MOD_RES (20)..(20): Xaa is Aib
  MISC_FEATURE (24)..(24): PEG (40kDa) covalently attached to Cysteine
  MISC_FEATURE (40)..(40): 14 Carbon fatty acyl group covalently attached Lysine
  MISC_FEATURE (40)..(40): C-terminal amidation

SEQ ID NO: 1103 - protein, 40 aa, Artificial Sequence; identical to SEQ ID NO: 759
  Synthetic polypeptide
  MOD_RES (2)..(2): Xaa is Aib
  MOD_RES (20)..(20): Xaa is Aib
  MISC_FEATURE (24)..(24): PEG (40kDa) covalently attached to Cysteine
  MISC_FEATURE (40)..(40): 18 Carbon fatty acyl group covalently attached to Lysine
  MISC_FEATURE (40)..(40): C-terminal amidation

SEQ ID NO: 1104 - protein, 40 aa, Artificial Sequence; identical to SEQ ID NO: 756
  Synthetic polypeptide
  MOD_RES (2)..(2): Xaa is Aib
  MOD_RES (20)..(20): Xaa is Aib
  MISC_FEATURE (40)..(40): 14 Carbon fatty acyl group covalently attached to Lysine
  MISC_FEATURE (40)..(40): C-terminal amidation

SEQ ID NO: 1105 - protein, 40 aa, Artificial Sequence; identical to SEQ ID NO: 756
  Synthetic polypeptide
  MOD_RES (2)..(2): Xaa is Aib
  MOD_RES (20)..(20): Xaa is Aib
  MISC_FEATURE (40)..(40): 16 Carbon fatty acyl group covalently attached Lysine
  MISC_FEATURE (40)..(40): C-terminal amidation

SEQ ID NO: 1106 - protein, 40 aa, Artificial Sequence; identical to SEQ ID NO: 756
  Synthetic polypeptide
  MOD_RES (2)..(2): Xaa is Aib
  MOD_RES (20)..(20): Xaa is Aib
  MISC_FEATURE (40)..(40): 18 Carbon fatty acyl group covalently attached to Lysine
  MISC_FEATURE (40)..(40): C-terminal amidation

SEQ ID NO: 1107 - protein, 40 aa, Artificial Sequence
  Synthetic polypeptide
  MOD_RES (2)..(2): Xaa is Aib
  MOD_RES (20)..(20): Xaa is Aib
  MISC_FEATURE (40)..(40): C-terminal amidation
YXQGTFTSDYSIYLDKQAAXEFVNWLLAGGPSSGAPPPSC

SEQ ID NO: 1108 - protein, 40 aa, Artificial Sequence; identical to SEQ ID NO: 1107
  Synthetic polypeptide
  MOD_RES (2)..(2): Xaa is Aib
  MOD_RES (20)..(20): Xaa is Aib
  MISC_FEATURE (40)..(40): PEG (40kDa) attached to Cysteine
  MISC_FEATURE (40)..(40): C-terminal amidation

SEQ ID NO: 1109 - protein, 40 aa, Artificial Sequence; identical to SEQ ID NO: 760
  Synthetic polypeptide
  MOD_RES (2)..(2): Xaa is Aib
  MOD_RES (20)..(20): Xaa is Aib
  MISC_FEATURE (40)..(40): C-terminal amidation

SEQ ID NO: 1110 - protein, 29 aa, Artificial Sequence
  Synthetic polypeptide
  MOD_RES (2)..(2): Xaa is Aib
  MOD_RES (20)..(20): Xaa is Aib
  MISC_FEATURE (29)..(29): C-terminal amidation
YXQGTFTSDYSIYLDKQAAXEFVCWLLAG

SEQ ID NO: 1111 - protein, 40 aa, Artificial Sequence; identical to SEQ ID NO: 756
  Synthetic polypeptide
  MOD_RES (2)..(2): Xaa is Aib
  MOD_RES (20)..(20): Xaa is Aib
  MISC_FEATURE (40)..(40): C-terminal amidation

SEQ ID NO: 1112 - protein, 29 aa, Artificial Sequence
  Synthetic polypeptide
  MISC_FEATURE (2)..(2): Xaa is Aib
  MISC_FEATURE (20)..(20): Xaa is Aib
YXQGTFTSDYSIYLDKQAAXEFVNWLLAG

SEQ ID NO: 1113 - protein, 39 aa, Artificial Sequence
  Synthetic polypeptide
  MOD_RES (2)..(2): Xaa is Aib
  MOD_RES (20)..(20): Xaa is Aib
  MISC_FEATURE (24)..(24): 14 Carbon fatty acyl group covalently attached to Lysine
  MISC_FEATURE (39)..(39): C-terminal amidation
YXEGTFTSDYSIYLDKQAAXEFVKWLLAGGPSSGAPPPS

SEQ ID NO: 1114 - protein, 39 aa, Artificial Sequence; identical to SEQ ID NO: 1113
  Synthetic polypeptide
  MOD_RES (2)..(2): Xaa is Aib
  MOD_RES (20)..(20): Xaa is Aib
  MISC_FEATURE (24)..(24): 16 Carbon fatty acyl group covalently attached to Lysine
  MISC_FEATURE (39)..(39): C-terminal amidation

SEQ ID NO: 1115 - protein, 39 aa, Artificial Sequence; identical to SEQ ID NO: 1113
  Synthetic polypeptide
  MOD_RES (2)..(2): Xaa is Aib
  MOD_RES (20)..(20): Xaa is Aib
  MISC_FEATURE (24)..(24): 18 Carbon fatty acyl group covalently attached to Lysine
  MISC_FEATURE (39)..(39): C-terminal amidation

SEQ ID NO: 1116 - protein, 39 aa, Artificial Sequence; identical to SEQ ID NO: 1113
  Synthetic polypeptide
  MOD_RES (2)..(2): Xaa is Aib
  MOD_RES (20)..(20): Xaa is Aib
  MISC_FEATURE (39)..(39): C-terminal amidation

SEQ ID NO: 1117 - protein, 39 aa, Artificial Sequence; identical to SEQ ID NO: 758
  Synthetic polypeptide
  MOD_RES (2)..(2): Xaa is Aib
  MISC_FEATURE (10)..(10): 14 Carbon fatty acyl group covalently attached to Lysine
  MOD_RES (20)..(20): Xaa is Aib
  MISC_FEATURE (39)..(39): C-terminal amidation

SEQ ID NO: 1118 - protein, 39 aa, Artificial Sequence; identical to SEQ ID NO: 758
  Synthetic polypeptide
  MOD_RES (2)..(2): Xaa is Aib
  MISC_FEATURE (10)..(10): 16 Carbon fatty acyl group covalently attached to Lysine
  MOD_RES (20)..(20): Xaa is Aib
  MISC_FEATURE (39)..(39): C-terminal amidation

SEQ ID NO: 1119 - protein, 39 aa, Artificial Sequence; identical to SEQ ID NO: 758
  Synthetic polypeptide
  MOD_RES (2)..(2): Xaa is Aib
  MISC_FEATURE (10)..(10): 18 Carbon fatty acyl group covalently attached to Lysine
  MOD_RES (20)..(20): Xaa is Aib
  MISC_FEATURE (39)..(39): C-terminal amidation

SEQ ID NO: 1120 - protein, 39 aa, Artificial Sequence; identical to SEQ ID NO: 758
  Synthetic polypeptide
  MOD_RES (2)..(2): Xaa is Aib
  MOD_RES (20)..(20): Xaa is Aib
  MISC_FEATURE (39)..(39): C-terminal amidation

SEQ ID NO: 1121 - protein, 40 aa, Artificial Sequence
  Synthetic polypeptide
  MOD_RES (2)..(2): Xaa is Aib
  MOD_RES (16)..(16): Xaa is Orn
  MOD_RES (20)..(20): Xaa is Aib
  MISC_FEATURE (40)..(40): C-terminal amidation
YXQGTFTSDYSIYLDXQAAXEFVNWLLAGGPSSGAPPPSC

SEQ ID NO: 1122 - protein, 40 aa, Artificial Sequence; identical to SEQ ID NO: 1121
  Synthetic polypeptide
  MOD_RES (2)..(2): Xaa is Aib
  MOD_RES (16)..(16): Xaa is 2,4-diaminobutyric acid
  MOD_RES (20)..(20): Xaa is Aib
  MISC_FEATURE (40)..(40): C-terminal amidation

SEQ ID NO: 1123 - protein, 40 aa, Artificial Sequence
  Synthetic polypeptide
  MOD_RES (2)..(2): Xaa is Aib
  MOD_RES (20)..(20): Xaa is Aib
  MISC_FEATURE (40)..(40): 14 Carbon fatty acyl group covalentaly attached to Lysine
  MISC_FEATURE (40)..(40): C-terminal amidation
YXQGTFTSDYSIYLDKQAAXEFVNWLLAGGPSSGAPPPSK

SEQ ID NO: 1124 - protein, 40 aa, Artificial Sequence; identical to SEQ ID NO: 1123
  Synthetic polypeptide
  MOD_RES (2)..(2): Xaa is Aib
  MOD_RES (20)..(20): Xaa is Aib
  MISC_FEATURE (40)..(40): 16 Carbon fatty acyl group covalently attached to Lysine
  MISC_FEATURE (40)..(40): C-terminal amidation

SEQ ID NO: 1125 - protein, 40 aa, Artificial Sequence; identical to SEQ ID NO: 1123
  Synthetic polypeptide
  MOD_RES (2)..(2): Xaa is Aib
  MOD_RES (20)..(20): Xaa is Aib
  MISC_FEATURE (40)..(40): 18 Carbon fatty acyl group covalently attached to Lysine
  MISC_FEATURE (40)..(40): C-terminal amidation

SEQ ID NO: 1126 - protein, 40 aa, Artificial Sequence; identical to SEQ ID NO: 1123
  Synthetic polypeptide
  MOD_RES (2)..(2): Xaa is Aib
  MOD_RES (20)..(20): Xaa is Aib
  MISC_FEATURE (40)..(40): C-terminal amidation

SEQ ID NO: 1127 - protein, 29 aa, Artificial Sequence
  Synthetic polypeptide
  MOD_RES (2)..(2): Xaa is Aib
  MOD_RES (20)..(20): Xaa is Aib
  MISC_FEATURE (24)..(24): PEG (40kDa) covalently attached to Cysteine
  MISC_FEATURE (29)..(29): C-terminal amidation
YXQGTFTSDYSIYLDKQAAXEFVCWLLAG

SEQ ID NO: 1128 - protein, 29 aa, Artificial Sequence
  Synthetic polypeptide
  MOD_RES (2)..(2): Xaa is Aib
  MISC_FEATURE (10)..(10): 14 Carbon fatty acyl group covalently attached to Lysine
  MOD_RES (20)..(20): Xaa is Aib
  MISC_FEATURE (29)..(29): C-terminal amidation
YXEGTFTSDKSIYLDKQAAXEFVNWLLAG

SEQ ID NO: 1129 - protein, 29 aa, Artificial Sequence
  Synthetic polypeptide
  MOD_RES (2)..(2): Xaa is Aib
  MISC_FEATURE (10)..(10): 16 Carbon fatty acyl group covalently attached to Lysine
  MOD_RES (20)..(20): Xaa is Aib
  MISC_FEATURE (29)..(29): C-terminal amidation
YXEGTFTSDKSIYLDKQAAXEFVNWLLAG

SEQ ID NO: 1130 - protein, 29 aa, Artificial Sequence
  Synthetic polypeptide
  MOD_RES (2)..(2): Xaa is Aib
  MISC_FEATURE (10)..(10): 18 Carbon fatty acyl group covalently attached to Lysine
  MOD_RES (20)..(20): Xaa is Aib
  MISC_FEATURE (29)..(29): C-terminal amidation
YXEGTFTSDKSIYLDKQAAXEFVNWLLAG

SEQ ID NO: 1131 - protein, 29 aa, Artificial Sequence
  Synthetic polypeptide
  MOD_RES (2)..(2): Xaa is Aib
  MOD_RES (20)..(20): Xaa is Aib
  MISC_FEATURE (29)..(29): C-terminal amidation
YXEGTFTSDKSIYLDKQAAXEFVNWLLAG

SEQ ID NO: 1132 - protein, 40 aa, Artificial Sequence; identical to SEQ ID NO: 766
  Synthetic polypeptide
  MOD_RES (2)..(2): Xaa is Aib
  MOD_RES (20)..(20): Xaa is Aib
  MISC_FEATURE (40)..(40): 14 Carbon fatty acyl group covalently attached to Lysine
  MISC_FEATURE (40)..(40): C-terminal amidation

SEQ ID NO: 1133 - protein, 40 aa, Artificial Sequence; identical to SEQ ID NO: 766
  Synthetic polypeptide
  MOD_RES (2)..(2): Xaa is Aib
  MOD_RES (20)..(20): Xaa is Aib
  MISC_FEATURE (40)..(40): 16 Carbon fatty acyl group covalently attached to Lysine
  MISC_FEATURE (40)..(40): C-terminal amidation

SEQ ID NO: 1134 - protein, 40 aa, Artificial Sequence; identical to SEQ ID NO: 766
  Synthetic polypeptide
  MOD_RES (2)..(2): Xaa is Aib
  MOD_RES (20)..(20): Xaa is Aib
  MISC_FEATURE (40)..(40): 18 Carbon fatty acyl group covalently attached to Lysine
  MISC_FEATURE (40)..(40): C-terminal amidation

SEQ ID NO: 1135 - protein, 40 aa, Artificial Sequence; identical to SEQ ID NO: 766
  Synthetic polypeptide
  MOD_RES (2)..(2): Xaa is Aib
  MOD_RES (20)..(20): Xaa is Aib
  MISC_FEATURE (40)..(40): C-terminal amidation

SEQ ID NO: 1136 - protein, 40 aa, Artificial Sequence; identical to SEQ ID NO: 766
  Synthetic polypeptide
  MOD_RES (2)..(2): Xaa is Aib
  MOD_RES (20)..(20): Xaa is Aib
  MISC_FEATURE (24)..(24): PEG (40kDa) covalently attached to Cysteine
  MISC_FEATURE (40)..(40): 14 Carbon fatty acyl group covalently attached to Lysine
  MISC_FEATURE (40)..(40): C-terminal amidation

SEQ ID NO: 1137 - protein, 40 aa, Artificial Sequence; identical to SEQ ID NO: 766
  Synthetic polypeptide
  MOD_RES (2)..(2): Xaa is Aib
  MOD_RES (20)..(20): Xaa is Aib
  MISC_FEATURE (24)..(24): PEG (40kDa) covalently attached to Cysteine
  MISC_FEATURE (40)..(40): 16 Carbon fatty acyl group covalently attached to Lysine
  MISC_FEATURE (40)..(40): C-terminal amidation

SEQ ID NO: 1138 - protein, 40 aa, Artificial Sequence; identical to SEQ ID NO: 766
  Synthetic polypeptide
  MOD_RES (2)..(2): Xaa is Aib
  MOD_RES (20)..(20): Xaa is Aib
  MISC_FEATURE (24)..(24): PEG (40kDa) covalently attached to Cysteine
  MISC_FEATURE (40)..(40): 18 Carbon fatty acyl group covalently attached to Lysine
  MISC_FEATURE (40)..(40): C-terminal amidation

SEQ ID NO: 1139 - protein, 40 aa, Artificial Sequence; identical to SEQ ID NO: 766
  Synthetic polypeptide
  MOD_RES (2)..(2): Xaa is Aib
  MOD_RES (20)..(20): Xaa is Aib
  MISC_FEATURE (24)..(24): PEG (40kDa) covalently attached to Cysteine
  MISC_FEATURE (40)..(40): C-terminal amidation

SEQ ID NO: 1140 - protein, 40 aa, Artificial Sequence; identical to SEQ ID NO: 760
  Synthetic polypeptide
  MOD_RES (2)..(2): Xaa is Aib
  MOD_RES (20)..(20): Xaa is Aib
  MISC_FEATURE (40)..(40): PEG (40kDa) covalently attached to Cysteine
  MISC_FEATURE (40)..(40): C-terminal amidation

SEQ ID NO: 1141 - protein, 40 aa, Artificial Sequence; identical to SEQ ID NO: 759
  Synthetic polypeptide
  MOD_RES (2)..(2): Xaa is Aib
  MOD_RES (20)..(20): Xaa is Aib
  MISC_FEATURE (40)..(40): 16 Carbon fatty acyl group covalently attached to Lysine
  MISC_FEATURE (40)..(40): C-terminal amidation

SEQ ID NO: 1142 - protein, 40 aa, Artificial Sequence
  Synthetic polypeptide
  MOD_RES (2)..(2): Xaa is Aib
  MOD_RES (20)..(20): Xaa is Aib
  MISC_FEATURE (40)..(40): 16 Carbon fatty acyl group covalently attached to Lysine
  MISC_FEATURE (40)..(40): C-terminal amidation
YXQGTFTSDYSIYLDKQAAXEFVCWLMNGGPSSGAPPPSK

SEQ ID NO: 1143 - protein, 40 aa, Artificial Sequence; identical to SEQ ID NO: 1142
  Synthetic polypeptide
  MOD_RES (2)..(2): Xaa is Aib
  MOD_RES (20)..(20): Xaa is Aib
  MISC_FEATURE (24)..(24): PEG (40kDa) covalently attached to Cysteine
  MISC_FEATURE (40)..(40): 16 Carbon fatty acyl group covalently attached to Lysine
  MISC_FEATURE (40)..(40): C-terminal amidation

SEQ ID NO: 1144 - protein, 40 aa, Artificial Sequence; identical to SEQ ID NO: 759
  Synthetic polypeptide
  MOD_RES (2)..(2): Xaa is Aib
  MOD_RES (20)..(20): Xaa is Aib
  MISC_FEATURE (40)..(40): 14 Carbon fatty acyl group covalently attached to Lysine
  MISC_FEATURE (40)..(40): C-terminal amidation

SEQ ID NO: 1145 - protein, 40 aa, Artificial Sequence; identical to SEQ ID NO: 759
  Synthetic polypeptide
  MOD_RES (2)..(2): Xaa is Aib
  MOD_RES (20)..(20): Xaa is Aib
  MISC_FEATURE (40)..(40): 18 Carbon fatty acyl group covalently attached to Lysine
  MISC_FEATURE (40)..(40): C-terminal amidation

SEQ ID NO: 1146 - protein, 40 aa, Artificial Sequence; identical to SEQ ID NO: 759
  Synthetic polypeptide
  MOD_RES (2)..(2): Xaa is Aib
  MOD_RES (20)..(20): Xaa is Aib
  MISC_FEATURE (40)..(40): C-terminal amidation

SEQ ID NO: 1147 - protein, 40 aa, Artificial Sequence; identical to SEQ ID NO: 756
  Synthetic polypeptide
  MOD_RES (2)..(2): Xaa is Aib
  MOD_RES (20)..(20): Xaa is Aib
  MISC_FEATURE (40)..(40): 3-SH-propionic acyl group covalently attached to Lysine
  MISC_FEATURE (40)..(40): C-terminal amidation

SEQ ID NO: 1148 - protein, 40 aa, Artificial Sequence; identical to SEQ ID NO: 1123
  Synthetic polypeptide
  MOD_RES (2)..(2): Xaa is Aib
  MOD_RES (20)..(20): Xaa is Aib
  MISC_FEATURE (40)..(40): 8 Carbon fatty acyl group covalently attached to Lysine
  MISC_FEATURE (40)..(40): C-terminal amidation

SEQ ID NO: 1149 - protein, 40 aa, Artificial Sequence
  Synthetic polypeptide
  MOD_RES (2)..(2): Xaa is Aib
  MOD_RES (20)..(20): Xaa is Aib
  MISC_FEATURE (40)..(40): C-terminal amidation
YXQGTFSSDYSIYLDKQAAXEFVNWLLAGGPSSGAPPPSC

SEQ ID NO: 1150 - protein, 40 aa, Artificial Sequence
  Synthetic polypeptide
  MOD_RES (2)..(2): Xaa is Aib
  MOD_RES (7)..(7): Xaa is 2-aminobutyric acid
  MOD_RES (20)..(20): Xaa is Aib
  MISC_FEATURE (40)..(40): C-terminal amidation
YXQGTFXSDYSIYLDKQAAXEFVNWLLAGGPSSGAPPPSC

SEQ ID NO: 1151 - protein, 40 aa, Artificial Sequence; identical to SEQ ID NO: 766
  Synthetic polypeptide
  MOD_RES (2)..(2): Xaa is Aib
  MOD_RES (20)..(20): Xaa is Aib
  MISC_FEATURE (40)..(40): 8 Carbon fatty acyl group covalently attached to Lysine
  MISC_FEATURE (40)..(40): C-terminal amidation

SEQ ID NO: 1152 - protein, 40 aa, Artificial Sequence; identical to SEQ ID NO: 759
  Synthetic polypeptide
  MOD_RES (2)..(2): Xaa is Aib
  MOD_RES (20)..(20): Xaa is Aib
  MISC_FEATURE (40)..(40): 8 Carbon fatty acyl group covalently attached to Lysine
  MISC_FEATURE (40)..(40): C-terminal amidation

SEQ ID NO: 1153 - protein, 40 aa, Artificial Sequence; identical to SEQ ID NO: 759
  Synthetic polypeptide
  MOD_RES (2)..(2): Xaa is Aib
  MOD_RES (20)..(20): Xaa is Aib
  MISC_FEATURE (24)..(24): PEG (40kDa) covalently attached to Cysteine
  MISC_FEATURE (40)..(40): C-terminal amidation

SEQ ID NO: 1154 - protein, 40 aa, Artificial Sequence
  Synthetic polypeptide
  MOD_RES (2)..(2): Xaa is Aib
  MOD_RES (20)..(20): Xaa is Aib
  MOD_RES (40)..(40): Xaa is d-Lysine
  MISC_FEATURE (40)..(40): 14 Carbon fatty acyl group covalently attached to d-Lysine
  MISC_FEATURE (40)..(40): C-terminal amidation
YXEGTFTSDYSIYLDKQAAXEFVCWLLAGGPSSGAPPPSX

SEQ ID NO: 1155 - protein, 40 aa, Artificial Sequence; identical to SEQ ID NO: 1154
  Synthetic polypeptide
  MOD_RES (2)..(2): Xaa is Aib
  MOD_RES (20)..(20): Xaa is Aib
  MOD_RES (40)..(40): Xaa is d-Lysine
  MISC_FEATURE (40)..(40): C-terminal amidation

SEQ ID NO: 1156 - protein, 40 aa, Artificial Sequence; identical to SEQ ID NO: 1154
  Synthetic polypeptide
  MOD_RES (2)..(2): Xaa is Aib
  MOD_RES (20)..(20): Xaa is Aib
  MISC_FEATURE (24)..(24): PEG (40kDa) covalently attached to Cysteine
  MOD_RES (40)..(40): Xaa is d-Lysine
  MISC_FEATURE (40)..(40): 14 Carbon fatty acyl group covalently attached to Lysine
  MISC_FEATURE (40)..(40): C-terminal amidation

SEQ ID NO: 1157 - protein, 40 aa, Artificial Sequence; identical to SEQ ID NO: 1154
  Synthetic polypeptide
  MOD_RES (2)..(2): Xaa is Aib
  MOD_RES (20)..(20): Xaa is Aib
  MISC_FEATURE (24)..(24): PEG (40kDa) covalently attached to Cysteine
  MISC_FEATURE (40)..(40): Xaa is d-Lysine
  MISC_FEATURE (40)..(40): C-terminal amidation

SEQ ID NO: 1158 - protein, 39 aa, Artificial Sequence
  Synthetic polypeptide
  MOD_RES (2)..(2): Xaa is Aib
  MISC_FEATURE (10)..(10): 14 Carbon fatty acyl group covalently attached to Lysine
  MOD_RES (20)..(20): Xaa is Aib
  MISC_FEATURE (40)..(40): C-terminal amidation
YXEGTFTSDKSIYLDKQAAXEFVCWLLAGGPSSGAPPPS

SEQ ID NO: 1159 - protein, 39 aa, Artificial Sequence; identical to SEQ ID NO: 1158
  Synthetic polypeptide
  MOD_RES (2)..(2): Xaa is Aib
  MOD_RES (20)..(20): Xaa is Aib
  MISC_FEATURE (40)..(40): C-terminal amidation

SEQ ID NO: 1160 - protein, 41 aa, Artificial Sequence
  Synthetic polypeptide
  MOD_RES (2)..(2): Xaa is Aib
  MOD_RES (20)..(20): Xaa is Aib
  MISC_FEATURE (40)..(40): 14 Carbon fatty acyl group covalently attached to Lysine
  MISC_FEATURE (41)..(41): C-terminal amidation
YXEGTFTSDYSIYLDKQAAXEFVNWLLAGGPSSGAPPPSKC

SEQ ID NO: 1161 - protein, 41 aa, Artificial Sequence; identical to SEQ ID NO: 1160
  Synthetic polypeptide
  MOD_RES (2)..(2): Xaa is Aib
  MOD_RES (20)..(20): Xaa is Aib
  MISC_FEATURE (41)..(41): C-terminal amidation

SEQ ID NO: 1162 - protein, 39 aa, Artificial Sequence; identical to SEQ ID NO: 1158
  Synthetic polypeptide
  MOD_RES (2)..(2): Xaa is Aib
  MISC_FEATURE (10)..(10): 14 Carbon fatty acyl group covalently attached to Lysine
  MOD_RES (20)..(20): Xaa is Aib
  MISC_FEATURE (24)..(24): PEG (40kDa) covalently attached to Cysteine
  MISC_FEATURE (39)..(39): C-terminal amidation

SEQ ID NO: 1163 - protein, 41 aa, Artificial Sequence; identical to SEQ ID NO: 1160
  Synthetic polypeptide
  MOD_RES (2)..(2): Xaa is Aib
  MOD_RES (20)..(20): Xaa is Aib
  MISC_FEATURE (40)..(40): 14 Carbon fatty acyl group covalently attached to Lysine
  MISC_FEATURE (41)..(41): PEG (40kDa) covalently attached to Cysteine
  MISC_FEATURE (41)..(41): C-terminal amidation

SEQ ID NO: 1164 - protein, 41 aa, Artificial Sequence; identical to SEQ ID NO: 1160
  Synthetic polypeptide
  MOD_RES (2)..(2): Xaa is Aib
  MOD_RES (20)..(20): Xaa is Aib
  MISC_FEATURE (41)..(41): PEG (40kDa) covalently attached to Cysteine
  MISC_FEATURE (41)..(41): C-terminal amidation

SEQ ID NO: 1165 - protein, 40 aa, Artificial Sequence
  Synthetic polypeptide
  MOD_RES (2)..(2): Xaa is Aib
  MISC_FEATURE (40)..(40): 14 Carbon fatty acyl group covalently attached to Lysine
  MISC_FEATURE (40)..(40): C-terminal amidation
HXQGTFTSDYSKYLDEQAAKEFICWLMNGGPSSGAPPPSK

SEQ ID NO: 1166 - protein, 40 aa, Artificial Sequence; identical to SEQ ID NO: 759
  Synthetic polypeptide
  MOD_RES (2)..(2): Xaa is Aib
  MOD_RES (20)..(20): Xaa is Aib
  MISC_FEATURE (24)..(24): PEG (40kDa) covalently attached to Cysteine
  MISC_FEATURE (40)..(40): 14 Carbon fatty acyl group covalently attached to Lysine
  MISC_FEATURE (40)..(40): C-terminal amidation

SEQ ID NO: 1167 - protein, 40 aa, Artificial Sequence
  Synthetic polypeptide
  MOD_RES (2)..(2): Xaa is Aib
  MOD_RES (16)..(16): Xaa is Aib
  MISC_FEATURE (40)..(40): C-terminal amidation
YXQGTFTSDYSIYLDXQAAKEFVNWLLAGGPSSGAPPPSC

SEQ ID NO: 1168 - protein, 40 aa, Artificial Sequence
  Synthetic polypeptide
  MOD_RES (2)..(2): Xaa is Aib
  MOD_RES (16)..(16): Xaa is Aib
  MISC_FEATURE (40)..(40): C-terminal amidation
YXQGTFTSDYSIYLDXQAAQEFVNWLLAGGPSSGAPPPSC

SEQ ID NO: 1169 - protein, 40 aa, Artificial Sequence
  Synthetic polypeptide
  MOD_RES (2)..(2): Xaa is Aib
  MOD_RES (12)..(16): Lactam bridge between residues 12 and 16
  MOD_RES (20)..(20): Xaa is Aib
  MOD_RES (40)..(40): C-terminal amidation
YXQGTFTSDYSKYLDEQAAXEFVNWLLAGGPSSGAPPPSC

SEQ ID NO: 1170 - protein, 10 aa, Artificial Sequence
  Synthetic polypeptide
GPSSGAPPPK

SEQ ID NO: 1171 - protein, 11 aa, Artificial Sequence
  Synthetic polypeptide
  MOD_RES (1)..(1): Xaa is Gly or a small, aliphatic or non-polar or slightly polar amino acid
XGPSSGAPPPK

SEQ ID NO: 1172 - protein, 12 aa, Artificial Sequence
  Synthetic  polypeptide
  MOD_RES (1)..(1): Xaa is Gly or a small, aliphatic or non-polar or slightly polar amino acid
XGPSSGAPPPSK

SEQ ID NO: 1173 - protein, 40 aa, Artificial Sequence; identical to SEQ ID NO: 1167
  Synethic polypeptide
  MOD_RES (2)..(2): Xaa is Aib
  MOD_RES (16)..(16): Xaa is Aib
  MISC_FEATURE (40)..(40): PEG (40kDa) covalently attached to Cysteine
  MISC_FEATURE (40)..(40): C-terminal amidation

SEQ ID NO: 1174 - protein, 40 aa, Artificial Sequence; identical to SEQ ID NO: 1168
  Synthetic polypeptide
  MOD_RES (2)..(2): Xaa is Aib
  MOD_RES (16)..(16): Xaa is Aib
  MISC_FEATURE (40)..(40): PEG (40kDa) covalently attached to Cysteine
  MISC_FEATURE (40)..(40): C-terminal amidation

SEQ ID NO: 1175 - protein, 40 aa, Artificial Sequence; identical to SEQ ID NO: 1121
  Synthetic polypeptide
  MOD_RES (2)..(2): Xaa is Aib
  MOD_RES (16)..(16): Xaa is Aib
  MOD_RES (20)..(20): Xaa is Aib
  MISC_FEATURE (40)..(40): C-terminal amidation

SEQ ID NO: 1176 - protein, 40 aa, Artificial Sequence
  Synthetic polypeptide
  MOD_RES (2)..(2): Xaa is Aib
  MOD_RES (20)..(20): Xaa is Aib
  MISC_FEATURE (40)..(40): C-terminal amidation
YXQGTFTSDYSIYLDEQAAXEFVNWLLAGGPSSGAPPPSC

SEQ ID NO: 1177 - protein, 29 aa, Artificial Sequence
  Synthetic polypeptide
  MOD_RES (2)..(2): Xaa is Aib
  MOD_RES (20)..(20): Xaa is Aib
  MISC_FEATURE (29)..(29): C-terminal amidation
YXQGTFTSDYSIYLDEQAAXEFVCWLLAG

SEQ ID NO: 1178 - protein, 29 aa, Artificial Sequence
  Synthetic polypeptide
  MISC_FEATURE: C-terminal amidation
  MOD_RES (2)..(2): Xaa is Aib
  MOD_RES (20)..(20): Xaa is Aib
YXQGTFTSDYSIYLDSQAAXEFVCWLLAG

SEQ ID NO: 1179 - protein, 30 aa, Artificial Sequene
  Synthetic polypeptide
  MOD_RES (2)..(2): Xaa is Aib
  MISC_FEATURE (24)..(24): PEG (40kDa) covalently attached to Cysteine
HXEGTFTSDVSSYLEEQAAKEFICWLVKGR

SEQ ID NO: 1180 - protein, 42 aa, Artificial Sequence
  Synthetic polypeptide
  MISC_FEATURE (24)..(24): Substituted amino acid covalently linked to hydrophilic group
YAPGTFISDYSIAMDKIHQQDFVXWLLAQKGKKNWLKHNITQ

SEQ ID NO: 1181 - protein, 40 aa, Artificial Sequence
  Synthetic polypeptide
  MOD_RES (2)..(2): Xaa is Aib
  MISC_FEATURE (16)..(20): Lactam bridge between residues 16 and 20
  MISC_FEATURE (40)..(40): Substituted amino acid covalentaly linked to hydrophilic group
YXQGTFTSDYSIYLDEQAAKEFVNWLLAGGPSSGAPPPSX

SEQ ID NO: 1182 - protein, 29 aa, Artificial Sequence
  Synthetic polypeptide
  MOD_RES (2)..(2): Xaa is Aib
  MISC_FEATURE (16)..(20): Lactam bridge between residues 16 and 20
  MISC_FEATURE (24)..(24): Substituted amino acid covalently linked to hydrophilic group
  misc_feature (29)..(29): Xaa can be any naturally occurring amino acid
YXQGTFTSDYSIYLDEQAAKEFVXWLLAX

SEQ ID NO: 1183 - protein, 39 aa, Artificial Sequence
  Synthetic polypeptide
  MOD_RES (2)..(2): Xaa is Aib
  MISC_FEATURE (16)..(20): Lactam bridge between residues 16 and 20
  MISC_FEATURE (24)..(24): Substituted amino acid covalently linked to hydrophilic group
YXQGTFTSDYSIYLDEQAAKEFVXWLLAGGPSSGAPPPS

SEQ ID NO: 1184 - protein, 40 aa, Artificial Sequence
  Synthetic polypeptide
  MOD_RES (2)..(2): Xaa is Aib
  MISC_FEATURE (16)..(20): Lactam bridge between residues 16 and 20
  MISC_FEATURE (40)..(40): Substituted amino acid covalently linked to hydrophilic group
YXEGTFTSDYSIYLDEQAAKEFVNWLLAGGPSSGAPPPSX

SEQ ID NO: 1185 - protein, 29 aa, Artificial Sequence
  Sythetic polypeptide
  MOD_RES (2)..(2): Xaa is Aib
  MISC_FEATURE (16)..(20): Lactam bridge between residues 16 and 20
  MISC_FEATURE (24)..(24): Substituted amino acid covalently linked to hydrophilic group
YXQGTFISDYSIYLDEQAAKEFVXWLLAG

SEQ ID NO: 1186 - protein, 40 aa, Artificial Sequence
  Synthetic polypeptide
  MOD_RES (2)..(2): Xaa is Aib
  MISC_FEATURE (16)..(20): Lactam bridge between residues 16 and 20
  MISC_FEATURE (40)..(40): Substituted amino acid covalently linked to hydrophilic group
YXQGTFISDYSIYLDEQAAKEFVNWLLAGGPSSGAPPPSX

SEQ ID NO: 1187 - protein, 29 aa, Artificial sequence
  Synthetic polypeptide
  MOD_RES (2)..(2): Xaa is Aib
  MISC_FEATURE (16)..(20): Lactam bridge between residues 16 and 20
  MISC_FEATURE (24)..(24): Substituted amino acid covalently linked to hydrophilic group
YXQGTFTSDYSIYLDEQAAKEFVXWLMNG

SEQ ID NO: 1188 - protein, 40 aa, Artificial sequence
  Synthetic polypeptide
  MOD_RES (2)..(2): Xaa is Aib
  MISC_FEATURE (16)..(20): Lactam bridge between residues 16 and 20
  MISC_FEATURE (40)..(40): Substitute amino acid covalently linked to hydrophilic group
YXQGTFVSDYSIYLDEQAAKEFVNWLLAGGPSSGAPPPSX

SEQ ID NO: 1189 - protein, 40 aa, Artificial sequence
  Synthetic polypeptide
  MOD_RES (2)..(2): Xaa is Aib
  MISC_FEATURE (16)..(20): Lactam bridge between residues 16 and 20
  MOD_RES (27)..(27): Xaa is Nle
  MISC_FEATURE (40)..(40): Substituted amino acid covalently linked to hydrophilic group
YXQGTFTSDYSIYLDEQAAKEFVNWLXAGGPSSGAPPPSX

SEQ ID NO: 1190 - protein, 40 aa, Artificial sequence
  Synthetic polypeptide
  MOD_RES (2)..(2): Xaa is Aib
  MISC_FEATURE (16)..(20): Lactam bridge between residues 16 and 20
  MISC_FEATURE (40)..(40): Substituted amino acid covalently linked to hydrophilic group
YXEGTFTSDYSIYLDEQAAKEFVNWLLAGRPSSGAPPPSX

SEQ ID NO: 1191 - protein, 43 aa, Artificial sequence
  Synthetic polypeptide
  MOD_RES (2)..(2): Xaa is Aib
  MISC_FEATURE (16)..(20): Lactam bridge between residues 16 and 20
  MISC_FEATURE (43)..(43): Substituted amino acid covalently linked to hydrophilic group
YXEGTFTSDYSIYLDEQAAKEFVNWLLAGKGKKNWLKHNITQX

SEQ ID NO: 1192 - protein, 40 aa, Artificial Sequence
  Synthetic polypeptide
  MOD_RES (2)..(2): Xaa is Aib
  MOD_RES (20)..(20): Xaa is Aib
  MISC_FEATURE (40)..(40): Substituted amino acid covalently linked to hydrophilic group
  MISC_FEATURE (40)..(40): C-terminal amidation
YXEGTFTSDYSIYLDKQAAXEFVNWLLAGGPSSGAPPPSX

SEQ ID NO: 1193 - protein, 40 aa, Artificial Sequence
  Synthetic polypeptide
  MOD_RES (2)..(2): Xaa is Aib
  MOD_RES (20)..(20): Xaa is Aib
  MISC_FEATURE (24)..(24): Substituted amino acid covalently linked to hydrophilic group
  MISC_FEATURE (40)..(40): C-terminal amidation
YXEGTFTSDYSIYLDKQAAXEFVXWLLAGGPSSGAPPPSK

SEQ ID NO: 1194 - protein, 40 aa, Artificial Sequence
  Synthetic polypeptide
  MOD_RES (2)..(2): Xaa is Aib
  MOD_RES (20)..(20): Xaa is Aib
  MISC_FEATURE (24)..(24): Substituted amino acid covalently linked to hydrophilic group
  MISC_FEATURE (40)..(40): Substitute amino acid covalently linked to an acyl or alkyl group
  MISC_FEATURE (40)..(40): C-terminal amidation
YXEGTFTSDYSIYLDKQAAXEFVXWLLAGGPSSGAPPPSX

SEQ ID NO: 1195 - protein, 40 aa, Artificial Sequence; identical to SEQ ID NO: 1192
  Synthetic polypeptide
  MOD_RES (2)..(2): Xaa is Aib
  MOD_RES (20)..(20): Xaa is Aib
  MISC_FEATURE (40)..(40): Substituted amino acid covalently linked to an acyl or alkyl group
  MISC_FEATURE (40)..(40): C-terminal amidation

SEQ ID NO: 1196 - protein, 40 aa, Artificial Sequence
  Synthetic polypeptide
  MOD_RES (2)..(2): Xaa is Aib
  MOD_RES (20)..(20): Xaa is Aib
  MISC_FEATURE (40)..(40): Substituted amino acid covalently linked to hydrophilic group
  MISC_FEATURE (40)..(40): C-terminal amidation
YXQGTFTSDYSIYLDKQAAXEFVNWLLAGGPSSGAPPPSX

SEQ ID NO: 1197 - protein, 39 aa, Artificial Sequence
  Synthetic polypeptide
  MOD_RES (2)..(2): Xaa is Aib
  MOD_RES (20)..(20): Xaa is Aib
  MISC_FEATURE (24)..(24): Substituted amino acid covalently linked to acyl or alkyl group
  MISC_FEATURE (39)..(39): C-terminal amidation
YXEGTFTSDYSIYLDKQAAXEFVXWLLAGGPSSGAPPPS

SEQ ID NO: 1198 - protein, 39 aa, Artificial Sequence
  Synthetic polypeptide
  MOD_RES (2)..(2): Xaa is Aib
  MISC_FEATURE (10)..(10): Substituted amino acid covalently linked to acyl or alkyl group
  MOD_RES (20)..(20): Xaa is Aib
  MISC_FEATURE (39)..(39): C-terminal amidation
YXEGTFTSDXSIYLDKQAAXEFVNWLLAGGPSSGAPPPS

SEQ ID NO: 1199 - protein, 40 aa, Artificial Sequence; identical to SEQ ID NO: 1196
  Synthetic polypeptide
  MOD_RES (2)..(2): Xaa is Aib
  MOD_RES (20)..(20): Xaa is Aib
  MISC_FEATURE (40)..(40): Substituted amino acid covalently linked to acyl or alkyl group
  MISC_FEATURE (40)..(40): C-terminal amidation

SEQ ID NO: 1200 - protein, 29 aa, Artificial Sequence
  Synthetic polypeptide
  MOD_RES (2)..(2): Xaa is Aib
  MOD_RES (20)..(20): Xaa is Aib
  MISC_FEATURE (24)..(24): Substituted amino acid covalently linked to hydrophilic group
  MISC_FEATURE (29)..(29): C-terminal amidation
YXQGTFTSDYSIYLDKQAAXEFVXWLLAG

SEQ ID NO: 1201 - protein, 29 aa, Artificial Sequence
  Synthetic polypeptide
  MOD_RES (2)..(2): Xaa is Aib
  MISC_FEATURE (10)..(10): Substituted amino acid covalently linked to acyl or alkyl group
  MOD_RES (20)..(20): Xaa is Aib
  MISC_FEATURE (29)..(29): C-terminal amidation
YXEGTFTSDXSIYLDKQAAXEFVNWLLAG

SEQ ID NO: 1202 - protein, 40 aa, Artificial Sequence
  Synthetic polypeptide
  MOD_RES (2)..(2): Xaa is Aib
  MOD_RES (20)..(20): Xaa is Aib
  MISC_FEATURE (40)..(40): Substituted amino acid covalently linked acyl or alkyl group
  MISC_FEATURE (40)..(40): C-terminal amidation
YXQGTFTSDYSIYLDKQAAXEFVCWLLAGGPSSGAPPPSX

SEQ ID NO: 1203 - protein, 40 aa, Artificial Sequence
  Synthetic polypeptide
  MOD_RES (2)..(2): Xaa is Aib
  MOD_RES (20)..(20): Xaa is Aib
  MISC_FEATURE (24)..(24): Substituted amino acid covalently linked to hydrophilic group
  MISC_FEATURE (40)..(40): Substituted amino acid covalently linked to acyl or alkyl group
  MISC_FEATURE (40)..(40): C-terminal amidation
YXQGTFTSDYSIYLDKQAAXEFVXWLLAGGPSSGAPPPSX

SEQ ID NO: 1204 - protein, 40 aa, Artificial Sequence
  Synthetic polypeptide
  MOD_RES (2)..(2): Xaa is Aib
  MOD_RES (20)..(20): Xaa is Aib
  MISC_FEATURE (24)..(24): Substituted amino acid covalently linked to hydrophilic group
  MISC_FEATURE (40)..(40): C-terminal amidation
YXQGTFTSDYSIYLDKQAAXEFVXWLLAGGPSSGAPPPSK

SEQ ID NO: 1205 - protein, 40 aa, Artificial Sequence; identical to SEQ ID NO: 1192
  Synthetic polypeptide
  MOD_RES (2)..(2): Xaa is Aib
  MOD_RES (20)..(20): Xaa is Aib
  MISC_FEATURE (40)..(40): Substituted amino acid covalently linked to hydrophilic group
  MISC_FEATURE (40)..(40): C-terminal amidation

SEQ ID NO: 1206 - protein, 40 aa, Artificial Sequence; identical to SEQ ID NO: 1154
  Synthetic polypeptide
  MOD_RES (2)..(2): Xaa is Aib
  MOD_RES (20)..(20): Xaa is Aib
  MISC_FEATURE (40)..(40): Substituted amino acid covalently linked to acyl or alkyl group
  MISC_FEATURE (40)..(40): C-terminal amidation

SEQ ID NO: 1207 - protein, 40 aa, Artificial Sequence
  Synthetic polypeptide
  MOD_RES (2)..(2): Xaa is Aib
  MOD_RES (20)..(20): Xaa is Aib
  MISC_FEATURE (40)..(40): Substituted amino acid covalently linked to acyl or alkyl group
  MISC_FEATURE (40)..(40): C-terminal amidation
YXQGTFTSDYSIYLDKQAAXEFVCWLMNGGPSSGAPPPSX

SEQ ID NO: 1208 - protein, 40 aa, Artificial Sequence
  Synthetic polypeptide
  MOD_RES (2)..(2): Xaa is Aib
  MOD_RES (20)..(20): Xaa is Aib
  MISC_FEATURE (24)..(24): Substituted amino acid covalently linked to hydrophilic group
  MISC_FEATURE (40)..(40): Substituted amino acid covalently linked to acyl or alkyl group
  MISC_FEATURE (40)..(40): C-terminal amidation
YXQGTFTSDYSIYLDKQAAXEFVXWLMNGGPSSGAPPPSX

SEQ ID NO: 1209 - protein, 40 aa, Artificial Sequence; identical to SEQ ID NO: 1154
  Synthetic polypeptide
  MOD_RES (2)..(2): Xaa is Aib
  MOD_RES (20)..(20): Xaa is Aib
  MISC_FEATURE (40)..(40): Substituted amino acid covalently linked to acyl or alkyl group
  MISC_FEATURE (40)..(40): C-terminal amidation

SEQ ID NO: 1210 - protein, 40 aa, Artificial Sequence; identical to SEQ ID NO: 1196
  Synthetic polypeptide
  MOD_RES (2)..(2): Xaa is Aib
  MOD_RES (20)..(20): Xaa is Aib
  MISC_FEATURE (40)..(40): Substituted amino acid covalently linked to acyl or alkyl group
  MISC_FEATURE (40)..(40): C-terminal amidation

SEQ ID NO: 1211 - protein, 40 aa, Artificial Sequence; identical to SEQ ID NO: 1202
  Synthetic polypeptide
  MOD_RES (2)..(2): Xaa is Aib
  MOD_RES (20)..(20): Xaa is Aib
  MISC_FEATURE (40)..(40): Substituted amino acid covalently linked to acyl or alkyl group
  MISC_FEATURE (40)..(40): C-terminal amidation

SEQ ID NO: 1212 - protein, 40 aa, Artificial Sequence; identical to SEQ ID NO: 1154
  Synthetic polypeptide
  MOD_RES (2)..(2): Xaa is Aib
  MOD_RES (20)..(20): Xaa is Aib
  MISC_FEATURE (40)..(40): Substituted amino acid covalently linked to acyl or alkyl group
  MISC_FEATURE (40)..(40): C-terminal amidation

SEQ ID NO: 1213 - protein, 40 aa, Artificial Sequence; identical to SEQ ID NO: 1193
  Synthetic polypeptide
  MOD_RES (2)..(2): Xaa is Aib
  MOD_RES (20)..(20): Xaa is Aib
  MISC_FEATURE (24)..(24): Substituted amino acid covalently linked to hydrophilic group
  MISC_FEATURE (40)..(40): C-terminal amidation

SEQ ID NO: 1214 - protein, 40 aa, Artificial Sequence; identical to SEQ ID NO: 1154
  Synthetic polypeptide
  MOD_RES (2)..(2): Xaa is Aib
  MOD_RES (20)..(20): Xaa is Aib
  MISC_FEATURE (40)..(40): Substituted amino acid covalently linked to acyl or alkyl group
  MISC_FEATURE (40)..(40): C-terminal amidation

SEQ ID NO: 1215 - protein, 40 aa, Artificial Sequence; identical to SEQ ID NO: 1194
  Synthetic polypeptide
  MOD_RES (2)..(2): Xaa is Aib
  MOD_RES (20)..(20): Xaa is Aib
  MISC_FEATURE (24)..(24): Substituted amino acid covalently linked to hydrophilic group
  MISC_FEATURE (40)..(40): Substituted amino acid covalently linked to acyl or alkyl group
  MISC_FEATURE (40)..(40): C-terminal amidation

SEQ ID NO: 1216 - protein, 40 aa, Artificial Sequence; identical to SEQ ID NO: 1194
  Synthetic polypeptide
  MOD_RES (2)..(2): Xaa is Aib
  MOD_RES (20)..(20): Xaa is Aib
  MISC_FEATURE (24)..(24): Substituted amino acid covalently linked to hydrophilic group
  MISC_FEATURE (40)..(40): C-terminal amidation

SEQ ID NO: 1217 - protein, 39 aa, Artificial Sequence
  Synthetic polypeptide
  MOD_RES (2)..(2): Xaa is Aib
  MISC_FEATURE (10)..(10): Substituted amino acid covalently linked to acyl or alkyl group
  MOD_RES (20)..(20): Xaa is Aib
  MISC_FEATURE (40)..(40): C-terminal amidation
YXEGTFTSDXSIYLDKQAAXEFVCWLLAGGPSSGAPPPS

SEQ ID NO: 1218 - protein, 41 aa, Artificial Sequence
  Synthetic polypeptide
  MOD_RES (2)..(2): Xaa is Aib
  MOD_RES (20)..(20): Xaa is Aib
  MISC_FEATURE (40)..(40): Substituted amino acid covalently linked to acyl or alkyl group
  MISC_FEATURE (41)..(41): C-terminal amidation
YXEGTFTSDYSIYLDKQAAXEFVNWLLAGGPSSGAPPPSXC

SEQ ID NO: 1219 - protein, 39 aa, Artificial Sequence
  Synthetic polypeptide
  MOD_RES (2)..(2): Xaa is Aib
  MISC_FEATURE (10)..(10): Substituted amino acid covalently linked to acyl or alkyl group
  MOD_RES (20)..(20): Xaa is Aib
  MISC_FEATURE (24)..(24): Substituted amino acid covalently linked to hydrophilic group
  MISC_FEATURE (39)..(39): C-terminal amidation
YXEGTFTSDXSIYLDKQAAXEFVXWLLAGGPSSGAPPPS

SEQ ID NO: 1220 - protein, 41 aa, Artificial Sequence
  Synthetic polypeptide
  MOD_RES (2)..(2): Xaa is Aib
  MOD_RES (20)..(20): Xaa is Aib
  MISC_FEATURE (40)..(40): Substituted amino acid covalently linked to acyl or alkyl group
  MISC_FEATURE (41)..(41): Substituted amino acid covalently linked to hydrophilic group
  MISC_FEATURE (41)..(41): C-terminal amidation
YXEGTFTSDYSIYLDKQAAXEFVNWLLAGGPSSGAPPPSXX

SEQ ID NO: 1221 - protein, 41 aa, Artificial Sequence
  Synthetic polypeptide
  MOD_RES (2)..(2): Xaa is Aib
  MOD_RES (20)..(20): Xaa is Aib
  MISC_FEATURE (41)..(41): Substituted amino acid covalently linked to hydrophilic group
  MISC_FEATURE (41)..(41): C-terminal amidation
YXEGTFTSDYSIYLDKQAAXEFVNWLLAGGPSSGAPPPSKX

SEQ ID NO: 1222 - protein, 40 aa, Artificial Sequence
  Synthetic polypeptide
  MOD_RES (2)..(2): Xaa is Aib
  MISC_FEATURE (40)..(40): Substituted amino acid covalently linked to acyl or alkyl group
  MISC_FEATURE (40)..(40): C-terminal amidation
HXQGTFTSDYSKYLDEQAAKEFICWLMNGGPSSGAPPPSX

SEQ ID NO: 1223 - protein, 40 aa, Artificial Sequence; identical to SEQ ID NO: 1194
  Synthetic polypeptide
  MOD_RES (2)..(2): Xaa is Aib
  MOD_RES (20)..(20): Xaa is Aib
  MISC_FEATURE (24)..(24): Substituted amino acid covalently linked to hydrophilic group
  MISC_FEATURE (40)..(40): Substituted amino acid covalently linked to acyl or alkyl group
  MISC_FEATURE (40)..(40): C-terminal amidation

SEQ ID NO: 1224 - protein, 40 aa, Artificial Sequence
  Synethic polypeptide
  MOD_RES (2)..(2): Xaa is Aib
  MOD_RES (16)..(16): Xaa is Aib
  MISC_FEATURE (40)..(40): Substituted amino acid covalently linked to hydrophilic group
  MISC_FEATURE (40)..(40): C-terminal amidation
YXQGTFTSDYSIYLDXQAAKEFVNWLLAGGPSSGAPPPSX

SEQ ID NO: 1225 - protein, 40 aa, Artificial Sequence
  Synthetic polypeptide
  MOD_RES (2)..(2): Xaa is Aib
  MOD_RES (16)..(16): Xaa is Aib
  MISC_FEATURE (40)..(40): Substituted amino acid covalently linked to hydrophilic group
  MISC_FEATURE (40)..(40): C-terminal amidation
YXQGTFTSDYSIYLDXQAAQEFVNWLLAGGPSSGAPPPSX

SEQ ID NO: 1226 - protein, 30 aa, Artificial Sequene; identical to SEQ ID NO: 1179
  Synthetic polypeptide
  MOD_RES (2)..(2): Xaa is Aib
  MISC_FEATURE (24)..(24): Substituted amino acid covalently linked to hydrophilic group

SEQ ID NO: 1227 - protein, 29 aa, Artificial Sequence
  Synthetic polypeptide
  MOD_RES (2)..(2): Xaa is Aib
  MOD_RES (20)..(20): Xaa is Aib
  MISC_FEATURE (29)..(29): C-terminal amidation
YXQGTFTSDYSIYLDKQAAXEFVNWLLAG

SEQ ID NO: 1228 - protein, 29 aa, Artificial Sequence
  Synthetic polypeptide
  MOD_RES (2)..(2): Xaa is D-Ser, D-Ala, Val, Gly, N-Methyl Ser, N-Methyl Ala, or Aib
  MOD_RES (16)..(16): Xaa is Lys, Glu, Ser, Orn, Dab, Aib or any alpha, alpha-disubstituted amino acid
  MOD_RES (20)..(20): Xaa is any alpha, alpha-disubstituted amino acid
  MOD_RES (27)..(27): Xaa is Ile, Leu, or Nle
  MOD_RES (28)..(28): Xaa is Ala or Gly
  MOD_RES (29)..(29): Xaa is Thr, Ala, or Gly
  MISC_FEATURE (29)..(29): C-terminal amidation
YXQGTFTSDYSIYLDXQAAXEFVNWLXXX

SEQ ID NO: 1229 - protein, 29 aa, Artificial Sequence
  Synthetic polypeptide
  MOD_RES (2)..(2): Xaa is Aib
  MOD_RES (20)..(20): Xaa is Aib
  MISC_FEATURE (29)..(29): C-terminal amidation
YXQGTFTSDYSKYLDKRRAXDFVQWLLAG

SEQ ID NO: 1230 - protein, 29 aa, Artificial Sequence
  Synthetic polypeptide
  MOD_RES (2)..(2): Xaa is D-Ser, DAla, Val, Gly, N-Methyl Ser, N-Methyl Ala, or Aib
  MOD_RES (16)..(16): Xaa is Lys, Glu, Ser, Orn, Dab, Aib or any alpha, alpha-disubstituted amino acid
  MOD_RES (20)..(20): Xaa is any alpha, alpha-disubstituted amino acid
  MOD_RES (27)..(27): Xaa is Ile, Leu, or Nle
  MOD_RES (28)..(28): Xaa is Ala or Gly
  MOD_RES (29)..(29): Xaa is Thr, Ala, or Gly
  MOD_RES (29)..(29): C-terminal amidation
YXQGTFTSDYSKYLDXRRAXDFVQWLXXX

SEQ ID NO: 1231 - protein, 41 aa, Artificial Sequence; identical to SEQ ID NO: 1160
  Synthetic polypeptide
  MISC_FEATURE: Homodimer
  MOD_RES (2)..(2): Xaa is Aib
  MOD_RES (20)..(20): Xaa is Aib
  MISC_FEATURE (40)..(40): 14 Carbon fatty acyl group covalently bound to Lysine
  MOD_RES (40)..(40): C-terminal amidation
  DISULFID (41)..(41): Disulfide bond formed with Cys residue of a second peptide having the same structure.

SEQ ID NO: 1232 - protein, 40 aa, Artificial Sequence
  Synthetic polypeptide
  MOD_RES (2)..(2): Xaa is Aib
  MOD_RES (20)..(20): Xaa is Aib
  MISC_FEATURE (40)..(40): C-terminal amidation
YXQGTFTSDYSIYLDKQAAXEFVNWLMNGGPSSGAPPPSK

SEQ ID NO: 1233 - protein, 40 aa, Artificial Sequence
  Synthetic polypeptide
  MOD_RES (2)..(2): Xaa is Aib
  MOD_RES (20)..(20): Xaa is Aib
  MISC_FEATURE (40)..(40): C-terminal amidation
YXQGTFISDYSIYLDKQAAXEFVNWLLAGGPSSGAPPPSK

SEQ ID NO: 1234 - protein, 40 aa, Artificial Sequence; identical to SEQ ID NO: 1233
  Synthetic polypeptide
  MOD_RES (2)..(2): Xaa is Aib
  MOD_RES (20)..(20): Xaa is Aib
  MISC_FEATURE (40)..(40): 16 Carbon fatty acyl group covalently bound to Lysine
  MISC_FEATURE (40)..(40): C-terminal amidation

SEQ ID NO: 1235 - protein, 40 aa, Artificial Sequence; identical to SEQ ID NO: 756
  Synthetic polypeptide
  MOD_RES (2)..(2): Xaa is Aib
  MOD_RES (20)..(20): Xaa is Aib
  MISC_FEATURE (40)..(40): 16 Carbon fatty acyl group covalently bound to Lysine via a dipeptide spacer
  MISC_FEATURE (40)..(40): C-terminal amidation

SEQ ID NO: 1236 - protein, 40 aa, Artificial Sequence; identical to SEQ ID NO: 1123
  Synthetic polypeptide
  MOD_RES (2)..(2): Xaa is Aib
  MOD_RES (20)..(20): Xaa is Aib
  MISC_FEATURE (40)..(40): 16 Carbon fatty acyl group covalently bound to Lysine via a dipeptide spacer
  MISC_FEATURE (40)..(40): C-terminal amidation

SEQ ID NO: 1237 - protein, 40 aa, Artificial Sequence; identical to SEQ ID NO: 765
  Synthetic polypeptide
  MOD_RES (2)..(2): Xaa is Aib
  MISC_FEATURE (10)..(10): 16 Carbon fatty acyl group covalently bound to Lysine via dipeptide spacer
  MOD_RES (20)..(20): Xaa is Aib
  MISC_FEATURE (40)..(40): C-terminal amidation

SEQ ID NO: 1238 - protein, 41 aa, Artificial Sequence; identical to SEQ ID NO: 1160
  Synthetic polypeptide
  MISC_FEATURE: Homodimer
  MOD_RES (2)..(2): Xaa is Aib
  MOD_RES (20)..(20): Xaa is Aib
  MISC_FEATURE (40)..(40): 14 Carbon fatty acyl group covelently bound to Lysine
  MISC_FEATURE (41)..(41): C-terminal amidation
  MISC_FEATURE (41)..(41): Cys residue covalently attached to 20 kDa PEG which is in turn covalently attached to a Cys residue of a second peptide having the same structure

SEQ ID NO: 1239 - protein, 41 aa, Artificial Sequence; identical to SEQ ID NO: 1160
  Synthetic polypeptide
  MISC_FEATURE: homodimer
  MOD_RES (2)..(2): Xaa is Aib
  MOD_RES (20)..(20): Xaa is Aib
  MISC_FEATURE (40)..(40): 14 Carbon fatty acyl group covalently bound to Lysine
  MISC_FEATURE (41)..(41): PEG (5kDa) covalently bound to Cysteine
  MISC_FEATURE (41)..(41): C-terminal amidation
  MISC_FEATURE (41)..(41): Cys residue covalently attached to 5 kDa PEG which is in turn covalently attached to a Cys residue of a second peptide having the same structure

SEQ ID NO: 1240 - protein, 29 aa, Artificial Sequence
  Synthetic polypeptide
  MOD_RES (3)..(3): Xaa is a Glutamine analog
  MOD_RES (27)..(27): Xaa is Nle
HSXGTFTSDYSKYLDTRRAAEFVAWLXDE

SEQ ID NO: 1241 - protein, 29 aa, Artificial Sequence
  Synthetic polypeptide
  MOD_RES (3)..(3): Xaa is a Glutamine analog
  MOD_RES (16)..(16): Xaa is Aib
HSXGTFTSDYSKYLDXRRAADFVAWLMDE

SEQ ID NO: 1242 - protein, 29 aa, Artificial Sequence
  Synthetic polypeptide
  MOD_RES (27)..(27): Xaa is Nle
HSQGTFTSDYSKYLDTRRAAEFVAWLXDE

SEQ ID NO: 1243 - protein, 29 aa, Artificial Sequence
  Synthetic peptide
  MOD_RES (3)..(3): Xaa is Acetamidomethyl-cysteine
  MOD_RES (27)..(27): Xaa is Nle
HSXGTFTSDYSKYLDTRRAAEFVAWLXDE

SEQ ID NO: 1244 - protein, 29 aa, Artificial Sequence
  Synthetic peptide
  MOD_RES (3)..(3): Xaa is Acetyldiaminobutanoic acid
  MOD_RES (27)..(27): Xaa is Nle
HSXGTFTSDYSKYLDTRRAAEFVAWLXDE

SEQ ID NO: 1245 - protein, 29 aa, Artificial Sequence
  Synthetic polypeptide
  MOD_RES (3)..(3): Xaa is carbamoyldiaminopropanoic acid
  MOD_RES (27)..(27): Xaa is Nle
HSXGTFTSDYSKYLDTRRAAEFVAWLXDE

SEQ ID NO: 1246 - protein, 29 aa, Artificial Sequence
  Synthetic polypeptide
  MOD_RES (3)..(3): Xaa is Methylglutamine
  MOD_RES (27)..(27): Xaa is Nle
HSXGTFTSDYSKYLDTRRAAEFVAWLXDE

SEQ ID NO: 1247 - protein, 29 aa, Artificial Sequence
  Synthetic peptide
  MOD_RES (3)..(3): Xaa is Methionine sulfoxide
  MOD_RES (27)..(27): Xaa is Nle
HSXGTFTSDYSKYLDTRRAAEFVAWLXDE

SEQ ID NO: 1248 - protein, 29 aa, Artificial Sequence
  Synthetic peptide
  MOD_RES (3)..(3): Xaa is Acetylornithine
  MOD_RES (27)..(27): Xaa is Nle
HSXGTFTSDYSKYLDTRRAAEFVAWLXDE

SEQ ID NO: 1249 - protein, 29 aa, Artificial Sequence
  Synthetic polypeptide
  MOD_RES (16)..(16): Xaa is Aib
HSQGTFTSDYSKYLDXRRAADFVAWLMDE

SEQ ID NO: 1250 - protein, 29 aa, Artificial Sequence
  Synthetic polypeptide
  MOD_RES (3)..(3): Xaa is Acetyldiaminobutanoic acid
  MOD_RES (16)..(16): Xaa is Aib
HSXGTFTSDYSKYLDXRRAADFVAWLMDE

SEQ ID NO: 1251 - protein, 29 aa, Artificial Sequence
  Synthetic polypeptide
  MOD_RES (3)..(3): Xaa is Methylglutamine
  MOD_RES (16)..(16): Xaa is Aib
HSXGTFTSDYSKYLDXRRAADFVAWLMDE

SEQ ID NO: 1252 - protein, 29 aa, Artificial Sequence
  Synthetic polypeptide
HSQGTFTSDYSKYLDSRRAQDFVQWLMDT

SEQ ID NO: 1253 - protein, 29 aa, Artificial Sequence
  Synthetic polypeptide
  MOD_RES (3)..(3): Xaa is Acetyldiaminobutanoic acid
  MOD_RES (16)..(16): Xaa is Aib
HSXGTFTSDYSKYLDXRRAADFVAWLLDE

SEQ ID NO: 1254 - protein, 39 aa, Artificial Sequence; identical to SEQ ID NO: 604
  Synthetic polypeptide
  MOD_RES (3)..(3): Xaa is Acetyldiaminobutanoic acid
  MOD_RES (16)..(16): Xaa is Aib
  MISC_FEATURE (39)..(39): C-terminal amidation

SEQ ID NO: 1255 - protein, 29 aa, Artificial Sequence
  Synthetic polypeptide
  MOD_RES (3)..(3): Xaa is Acetyldiaminobutanoic acid
  MOD_RES (16)..(16): Xaa is Aib
HSXGTFTSDYSKYLDXRRASDFVSWLLDE

SEQ ID NO: 1256 - protein, 29 aa, Artificial Sequence
  Synthetic polypeptide
  MOD_RES (3)..(3): Xaa is Acetyldiaminobutanoic acid
  MOD_RES (16)..(16): Xaa is Aib
HSXGTFTSDYSKYLDXRRATDFVTWLLDE

SEQ ID NO: 1257-1258 - skipped (2 entries)

SEQ ID NO: 1259 - protein, 40 aa, Artificial Sequence
  Synthetic peptide
  MOD_RES (2)..(2): Xaa is Aib
  MISC_FEATURE (16)..(20): Lactam bridge links Glu16 and Lys20
  MOD_RES (40)..(40): Epsilon amine of Lys is attached to Ala-Ac-Cys(PEG), wherein the Ac-Cys(PEG) is a Cys residue comprising an alpha amino group capped with an acetyl group (CH3CO) and comprising a 40 kDa PEG covalently attached to its side chain
YXQGTFTSDYSIYLDEQAAKEFVNWLLAGGPSSGAPPPSK

SEQ ID NO: 1260 - protein, 40 aa, Artificial Sequence; identical to SEQ ID NO: 1259
  Synthetic peptide
  MOD_RES (2)..(2): Xaa is Aib
  MISC_FEATURE (16)..(20): Lactam bridge links Glu16 and Lys20
  MOD_RES (40)..(40): Epsilon amine of Lys is attached to Arg-Ac-Cys(PEG), wherein the Ac-Cys(PEG) is a Cys residue comprising an alpha amino group capped with an acetyl group (CH3CO) and comprising a 40 kDa PEG covalently attached to its side chain

SEQ ID NO: 1261 - protein, 40 aa, Artificial Sequence; identical to SEQ ID NO: 761
  Synthetic peptide
  MOD_RES (2)..(2): Xaa is Aib
  MISC_FEATURE (16)..(20): Lactam bridge links Glu16 and Lys20
  MOD_RES (40)..(40): Cys-PEG covalently linked via thioether linkage

SEQ ID NO: 1262 - protein, 40 aa, Artificial Sequence
  Synthetic peptide
  MOD_RES (2)..(2): Xaa is Aib
HXQGTFTSDYSKYLDERRAQDFVQWLMNTGPSSGAPPPSK

SEQ ID NO: 1263-1300 - skipped (38 entries)

SEQ ID NO: 1301 - protein, 29 aa, Homo sapiens
HSQGTFTSDYSKYLDSRRAQDFVQWLMNT

SEQ ID NO: 1302 - protein, 28 aa, Artificial Sequence
  Synthetic Polypeptide
  MISC_FEATURE: Glucagon analogue
  MISC_FEATURE (8)..(8): Xaa is aspartic acid, glutamic acid, cysteic acid or homocysteic acid
SQGTFTSXYSKYLDSRRAQDFVQWLMNT

SEQ ID NO: 1303 - protein, 27 aa, Artificial Sequence
  Synthetic Polypeptide
  MISC_FEATURE: Glucagon analogue
  MISC_FEATURE (7)..(7): Xaa is aspartic acid, glutamic acid, cysteic acid or homocysteic acid
QGTFTSXYSKYLDSRRAQDFVQWLMNT

SEQ ID NO: 1304 - protein, 26 aa, Artificial Sequence
  Synthetic Polypeptide
  MISC_FEATURE: Glucagon analogue
  MISC_FEATURE (6)..(6): Xaa is aspartic acid, glutamic acid, cysteic acid or homocysteic acid
GTFTSXYSKYLDSRRAQDFVQWLMNT

SEQ ID NO: 1305 - protein, 25 aa, Artificial Sequence
  Synthetic Polypeptide
  MISC_FEATURE: Glucagon analogue
  MISC_FEATURE (5)..(5): Xaa is aspartic acid, glutamic acid, cysteic acid or homocysteic acid
TFTSXYSKYLDSRRAQDFVQWLMNT

SEQ ID NO: 1306 - protein, 24 aa, Artificial Sequence
  Synthetic Polypeptide
  MISC_FEATURE: Glucagon analogue
  MISC_FEATURE (4)..(4): Xaa is glutamic acid, cysteic acid or homocysteic acid
  MISC_FEATURE (22)..(22): Xaa at position 22 is Met, Leu or Nle
FTSXYSKYLDSRRAQDFVQWLXNT

SEQ ID NO: 1307 - protein, 24 aa, Artificial Sequence
  Synthetic Polypeptide
  MOD_RES (1)..(1): N-terminal amino group replaced with hydroxy group
  MISC_FEATURE (4)..(4): Xaa is aspartic acid, glutamic acid, cysteic acid or homocysteic acid
  MISC_FEATURE (22)..(22): Xaa is Met, Leu or Nle
FTSXYSKYLDSRRAQDFVQWLXNT

SEQ ID NO: 1308 - protein, 24 aa, Artificial Sequence
  Synthetic Polypeptide
  MOD_RES (1)..(1): N-terminal amino group replaced with hydroxy group
  MISC_FEATURE (22)..(22): Xaa is  Met, Leu or Nle
  MOD_RES (24)..(24): C-terminal alpha carboxylate replaced with amide
FTSDYSRYLDSRRAQDFVQWLXNT

SEQ ID NO: 1309 - protein, 24 aa, Artificial Sequence
  Synthetic Polypeptide
  MISC_FEATURE: Glucagon analogue
  MOD_RES (1)..(1): N-terminal amino group replaced with hydroxy group
  MISC_FEATURE (4)..(4): Xaa is aspartic acid, glutamic acid, cysteic acid or homocysteic acid
  MISC_FEATURE (7)..(7): Xaa is Lys or Arg
  MISC_FEATURE (11)..(11): Xaa is Lys, Cys, Orn, homocysteine or acetyl phenyalanine
  MISC_FEATURE (22)..(22): Xaa is Met, Leu or Nle
FTSXYSXYLDXRRAQDFVQWLXNT

SEQ ID NO: 1310 - protein, 24 aa, Artificial Sequence
  Synthetic Polypeptide
  MISC_FEATURE: Glucagon analogue
  MOD_RES (1)..(1): N-terminal amino group replaced with hydroxy group
  MISC_FEATURE (4)..(4): Xaa is aspartic acid, glutamic acid, cysteic acid or homocysteic acid
  MISC_FEATURE (7)..(7): Xaa is is Lys or Arg
  MISC_FEATURE (16)..(16): Xaa is Lys, Cys, Orn, homocysteine or acetyl phenylalanine
  MISC_FEATURE (22)..(22): Xaa is Met, Leu or Nle
FTSXYSXYLDSRRAQXFVQWLXNT

SEQ ID NO: 1311 - protein, 24 aa, Artificial Sequence
  Synthetic Polypetide
  MISC_FEATURE: Glucagon analogue
  MOD_RES (1)..(1): N-terminal amino group replaced with hydroxy group
  MISC_FEATURE (4)..(4): Xaa is aspartic acid, glutamic acid, cysteic acid or homocysteic acid
  MISC_FEATURE (7)..(7): Xaa is Lys or Arg
  MISC_FEATURE (19)..(19): Xaa is Lys, Cys, Orn, homocysteine or acetyl phenylalanine
  MISC_FEATURE (22)..(22): Xaa is Met, Leu or Nle
FTSXYSXYLDSRRAQDFVXWLXNT

SEQ ID NO: 1312 - protein, 24 aa, Artificial Sequence
  Synthetic Polypeptide
  MISC_FEATURE: Glucagon analogue
  MOD_RES (1)..(1): N-terminal amino group replaced with hydroxy group
  MISC_FEATURE (4)..(4): Xaa is aspartic acid, glutamic acid, cysteic acid or homocysteic acid
  MISC_FEATURE (7)..(7): Xaa is Lys or Arg
  MISC_FEATURE (11)..(11): Xaa is Lys, Cys, Orn, homocysteine or acetyl phenylalanine
  MISC_FEATURE (19)..(19): Xaa is Lys, Cys, Orn, homocysteine or acetyl phenylalanine
  MISC_FEATURE (22)..(22): Xaa is Met, Leu or Nle
FTSXYSXYLDXRRAQDFVXWLXNT

SEQ ID NO: 1313 - protein, 24 aa, Artificial Sequence
  Synthetic Polypeptide
  MISC_FEATURE: Glucagon analogue
  MOD_RES (1)..(1): N-terminal amino group replaced with hydroxy group
  MISC_FEATURE (4)..(4): Xaa is aspartic acid, glutamic acid, cysteic acid or homocysteic acid
  MOD_RES (11)..(11): Pegylated
  MISC_FEATURE (22)..(22): Xaa is Met, Leu or Nle
FTSXYSKYLDCRRAQDFVQWLXNT

SEQ ID NO: 1314 - protein, 24 aa, Artificial Sequence
  Synthetic Polypeptide
  MISC_FEATURE: Glucagon analogue
  MOD_RES (1)..(1): N-terminal amino group replaced with hydroxy group
  MISC_FEATURE (4)..(4): Xaa is aspartic acid, glutamic acid, cysteic acid or homocysteic acid
  MOD_RES (19)..(19): Pegylated
  MISC_FEATURE (22)..(22): Xaa is Met, Leu or Nle
FTSXYSKYLDSRRAQDFVCWLXNT

SEQ ID NO: 1315 - protein, 24 aa, Artificial Sequence
  Synthetic Polypeptide
  MISC_FEATURE: Glucagon analogue
  MOD_RES (1)..(1): N-terminal amino group replaced with hydroxy group
  MISC_FEATURE (4)..(4): Xaa is aspartic acid, glutamic acid, cysteic acid or homocysteic acid
  MISC_FEATURE (22)..(22): Xaa is Met, Leu or Nle
  MOD_RES (24)..(24): Pegylated
FTSXYSKYLDSRRAQDFVQWLXNC

SEQ ID NO: 1316 - protein, 24 aa, Artificial Sequence
  Synthetic Polypeptide
  MISC_FEATURE: Glucagon analogue
  MOD_RES (1)..(1): N-terminal amino group replaced with hydroxy group
  MISC_FEATURE (4)..(4): Xaa is aspartic acid, glutamic acid, cysteic acid or homocysteic acid
  MOD_RES (19)..(19): Pegylated
  MISC_FEATURE (22)..(22): Xaa is Met, Leu or Nle
FTSXYSRYLDSRRAQDFVKWLXNT

SEQ ID NO: 1317 - protein, 24 aa, Artificial Sequence
  Synthetic Polypeptide
  MISC_FEATURE: Glucagon analogue
  MOD_RES (1)..(1): N-terminal amino group replaced with hydroxy group
  MISC_FEATURE (4)..(4): Xaa is aspartic acid, glutamic acid, cysteic acid or homocysteic acid
  MOD_RES (11)..(11): Pegylated
  MISC_FEATURE (22)..(22): Xaa is Met, Leu or Nle
FTSXYSKYLDCRRAQDFVCWLXNT

SEQ ID NO: 1318 - protein, 24 aa, Artificial Sequence
  Synthetic Polypeptide
  MISC_FEATURE: Glucagon analogue
  MOD_RES (1)..(1): N-terminal amino group replaced with hydroxy group
  MISC_FEATURE (4)..(4): Xaa is aspartic acid, glutamic acid, cysteic acid or homocysteic acid
  MISC_FEATURE (22)..(22): Xaa is Met, Leu or Nle
  MOD_RES (24)..(24): C-terminal alpha carboxylate replaced with amide
FTSXYSKYLECRRAQDFVQWLXNT

SEQ ID NO: 1319 - protein, 10 aa, Artificial Sequence
  Synthetic Polypeptide
  MISC_FEATURE: Peptide fragment representing the carboxy terminal 10 amino acids of Exendin-4
GPSSGAPPPS

SEQ ID NO: 1320 - protein, 8 aa, Artificial Sequence
  Synthetic Polypeptide
  MISC_FEATURE: Peptide fragment representing the carboxy terminal 8 amino acids of oxyntomodulin
KRNRNNIA

SEQ ID NO: 1321 - protein, 4 aa, Artificial Sequence
  Synthetic Polypeptide
  MISC_FEATURE: Peptide fragment representing the carboxy 4 amino acids of oxyntomodulin carboxy terminus
KRNR

SEQ ID NO: 1322 - protein, 24 aa, Artificial Sequence
  Synthetic Polypeptide
  MISC_FEATURE: Glucagon analogue
  MISC_FEATURE (7)..(7): Xaa is Lys or Arg
  MISC_FEATURE (11)..(11): Xaa is Lys, Cys, Orn, homocycstein or acetyl phenyalanine
  MISC_FEATURE (19)..(19): Xaa is Lys, Cys, Orn, homocycstein or acetyl phenyalanine
FTSRYSXYLDXRRAQDFVXWLMNT

SEQ ID NO: 1323 - protein, 34 aa, Artificial Sequence
  Synthetic Polypeptide
  MISC_FEATURE: Glucagon analogue
  MISC_FEATURE (4)..(4): Xaa is aspartic acid, glutamic acid, cysteic acid or homocysteic acid
  MISC_FEATURE (7)..(7): Xaa is Lys or Arg
  MISC_FEATURE (16)..(16): Xaa is Lys, Cys, Orn, homocysteine or acetyl phenylalanine
  MISC_FEATURE (22)..(22): Xaa is Met, Leu or Nle
FTSXYSXYLDSRRAQXFVQWLXNTGPSSGAPPPS

SEQ ID NO: 1324 - protein, 32 aa, Artificial Sequence
  Synthetic Polypeptide
  MISC_FEATURE: Glucagon analogue
  MISC_FEATURE (4)..(4): Xaa is aspartic acid, glutamic acid, cysteic acid or homocysteic acid
  MISC_FEATURE (7)..(7): Xaa is Lys or Arg
  MISC_FEATURE (19)..(19): Xaa is Lys, Cys, Orn, homocysteine or acetyl phenylalanine
  MOD_RES (19)..(19): Pegylated
  MISC_FEATURE (22)..(22): Xaa is Met, Leu or Nle
FTSXYSXYLDSRRAQDFVXWLXNTKRNRNNIA

SEQ ID NO: 1325 - protein, 34 aa, Artificial Sequence
  Synthetic Polypeptide
  MISC_FEATURE: Glucagon analogue
  MISC_FEATURE (4)..(4): Xaa is aspartic acid, glutamic acid, cysteic acid or homocysteic acid
  MISC_FEATURE (7)..(7): Xaa is Lys or Arg
  MISC_FEATURE (19)..(19): Xaa is Lys, Cys, Orn, homocysteine or acetyl phenylalanine
  MOD_RES (19)..(19): Pegylated
  MISC_FEATURE (22)..(22): Xaa is Met, Leu or Nle
FTSXYSXYLDSRRAQDFVXWLXNTGPSSGAPPPS

SEQ ID NO: 1326 - protein, 32 aa, Artificial Sequence
  Synthetic Polypeptide
  MISC_FEATURE: Glucagon analogue
  MISC_FEATURE (4)..(4): Xaa is aspartic acid, glutamic acid, cysteic acid or homocysteic acid
  MISC_FEATURE (7)..(7): Xaa is Lys or Arg
  MISC_FEATURE (16)..(16): Xaa is Lys, Cys, Orn, homocysteine or acetyl phenylalanine
  MOD_RES (16)..(16): Pegylation
  MISC_FEATURE (22)..(22): Xaa is Met, Leu or Nle
FTSXYSXYLDSRRAQXFVQWLXNTKRNRNNIA

SEQ ID NO: 1327 - protein, 28 aa, Artificial Sequence
  Synthetic Polypeptide
  MISC_FEATURE: Glucagon analogue
  MISC_FEATURE (4)..(4): Xaa is aspartic acid, glutamic acid, cysteic acid or homocysteic acid
  MISC_FEATURE (7)..(7): Xaa is Lys or Arg
  MISC_FEATURE (16)..(16): Xaa is Lys, Cys, Orn, homocysteine or acetyl phenylalanine
  MOD_RES (16)..(16): Pegylated
  MISC_FEATURE (22)..(22): Xaa is Met, Leu or Nle
FTSXYSXYLDSRRAQXFVQWLXNTKRNR

SEQ ID NO: 1328 - protein, 28 aa, Artificial Sequence
  Synthetic Polypeptide
  MISC_FEATURE: Glucagon analogue
  MISC_FEATURE (4)..(4): Xaa is aspartic acid, glutamic acid, cysteic acid or homocysteic acid
  MISC_FEATURE (7)..(7): Xaa is Lys or Arg
  MISC_FEATURE (19)..(19): Xaa is Lys, Cys, Orn, homocysteine or acetyl phenylalanine
  MOD_RES (19)..(19): Pegylated
  MISC_FEATURE (22)..(22): Xaa is Met, Leu or Nle
FTSXYSXYLDSRRAQDFVXWLXNTKRNR

SEQ ID NO: 1329 - protein, 34 aa, Artificial Sequence
  Synthetic Polypeptide
  MISC_FEATURE: Glucagon analogue
  MOD_RES (1)..(1): N-terminal amino group replaced with hydroxy group
  MISC_FEATURE (4)..(4): Xaa is aspartic acid, glutamic acid, cysteic acid or homocysteic acid
  MISC_FEATURE (22)..(22): Xaa is Met, Leu or Nle
FTSXYSKYLDSRRAQDFVQWLXNTGPSSGAPPPS

SEQ ID NO: 1330 - protein, 32 aa, Artificial Sequence
  Synthetic Polypeptide
  MISC_FEATURE: Glucagon analogue
  MOD_RES (1)..(1): N-terminal amino group replaced with hydroxy group
  MISC_FEATURE (4)..(4): Xaa is aspartic acid, glutamic acid, cysteic acid or homocysteic acid
  MISC_FEATURE (22)..(22): Xaa is Met, Leu or Nle
FTSXYSKYLDSRRAQDFVQWLXNTKRNRNNIA

SEQ ID NO: 1331 - protein, 28 aa, Artificial Sequence
  Synthetic Polypeptide
  MISC_FEATURE: Glucagon analogue
  MOD_RES (1)..(1): N-terminal amino group replaced with hydroxy group
  MISC_FEATURE (4)..(4): Xaa is aspartic acid, glutamic acid, cysteic acid or homocysteic acid
  MISC_FEATURE (22)..(22): Xaa is Met, Leu or Nle
FTSXYSKYLDSRRAQCFVQWLXNTKRNR

SEQ ID NO: 1332 - protein, 29 aa, Artificial Sequence
  Synthetic Polypeptide
  MISC_FEATURE: Glucagon analogue
HSQGTFTSDYSKYLDSCRAQDFVQWLMNT

SEQ ID NO: 1333 - protein, 39 aa, Artificial Sequence; identical to SEQ ID NO: 521
  Synthetic Polypeptide
  MISC_FEATURE: Glucagon analogue

SEQ ID NO: 1334 - protein, 29 aa, Artificial Sequence
  Synthetic Polypeptide
  MISC_FEATURE: Glucagon analogue
  MOD_RES (24)..(24): 2-butyrolactone bound through thiol group of Cysteine
HSQGTFTSDYSKYLDSRRAQCFVQWLMNT

SEQ ID NO: 1335 - protein, 29 aa, Artificial Sequence
  Synthetic Polypeptide
  MISC_FEATURE: Glucagon Analogue
  MOD_RES (24)..(24): Carboxymethyl group bound through thiol group of Cysteine
HSQGTFTSDYSKYLDSRRAQCFVQWLMNT

SEQ ID NO: 1336 - protein, 24 aa, Artificial Sequence
  Synthetic Polypeptide
  MISC_FEATURE: Glucagon analogue
  MOD_RES (1)..(1): N-terminal amino group replaced with hydroxy group
  MISC_FEATURE (4)..(4): Xaa is aspartic acid, glutamic acid, cysteic acid or homocysteic acid
  MISC_FEATURE (22)..(22): Xaa is Met, Leu or Nle
FTSXYSKYLESRRAQDFVQWLXNT

SEQ ID NO: 1337 - protein, 24 aa, Artificial Sequence
  Synthetic Polypeptide
  MISC_FEATURE: Glucagon analogue
  MOD_RES (1)..(1): N-terminal amino group replaced with hydroxy group
  MISC_FEATURE (22)..(22): Xaa is Met, Leu or Nle
FTSDYSKYLDSRRAQDFVQWLXNT

SEQ ID NO: 1338 - protein, 24 aa, Artificial Sequence
  Synthetic Polypeptide
  MISC_FEATURE: Glucagon analogue
  MOD_RES (1)..(1): N-terminal amino group replaced with hydroxy group
  MISC_FEATURE (22)..(22): Xaa is Met, Leu or Nle
FTSDYSKYLESRRAQDFVQWLXNT

SEQ ID NO: 1339 - protein, 24 aa, Artificial Sequence
  Synthetic Polypeptide
  MISC_FEATURE: Glucagon analogue
  MISC_FEATURE (1)..(1): N-terminal amino group replaced with hydroxy group
  MISC_FEATURE (4)..(4): Xaa is aspartic acid, glutamic acid, cysteic acid or homocysteic acid
  MISC_FEATURE (22)..(22): Xaa is Met, Leu or Nle
  MISC_FEATURE (23)..(23): Xaa is Asn, Asp, Glu, cysteic acid or homocysteic acid
  MISC_FEATURE (24)..(24): Xaa id Thr, Asp, Glu, cysteic acid or homocysteic acid
FTSXYSKYLDSRRAQDFVQWLXXX

SEQ ID NO: 1340 - protein, 24 aa, Artificial Sequence
  Synthetic Polypeptide
  MISC_FEATURE: Glucagon analogue
  MOD_RES (1)..(1): N-terminal amino group replaced with hydroxy group
  MISC_FEATURE (4)..(4): Xaa is aspartic acid, glutamic acid, cysteic acid or homocysteic acid
  MISC_FEATURE (10)..(10): Xaa is Glu, cysteic acid, homoglutamic acid or homocysteic acid
  MISC_FEATURE (22)..(22): Xaa is Met, Leu or Nle
  MISC_FEATURE (23)..(23): Xaa is Asn or an acidic amino acid
  MISC_FEATURE (24)..(24): Xaa is Thr or an acidic amino acid
FTSXYSKYLXSRRAQDFVQWLXXX

SEQ ID NO: 1341 - protein, 24 aa, Artificial Sequence
  Synthetic Polypeptide
  MISC_FEATURE: Glucagon analogue
  MOD_RES (1)..(1): N-terminal amino group replaced with hydroxy group
  MISC_FEATURE (4)..(4): Xaa is aspartic acid, glutamic acid, cysteic acid or homocysteic acid
  MISC_FEATURE (10)..(10): Xaa is Glu, cysteic acid, homoglutamic acid or homocysteic acid
  MISC_FEATURE (22)..(22): Xaa is Met, Leu or Nle
  MISC_FEATURE (23)..(23): Xaa is Asn, Asp or Glu
  MISC_FEATURE (24)..(24): Xaa is Thr, glu or Asp
FTSXYSKYLXSRRAQDFVQWLXXX

SEQ ID NO: 1342 - protein, 24 aa, Artificial Sequence
  Synthetic Polypeptide
  MISC_FEATURE: Glucagon analogue
  MOD_RES (1)..(1): N-terminal amino group replaced with hydroxy group
  MISC_FEATURE (4)..(4): Xaa is aspartic acid, glutamic acid, cysteic acid or homocysteic acid
  MISC_FEATURE (10)..(10): Xaa is Glu, cysteic acid, homoglutamic acid or homocysteic acid
  MISC_FEATURE (22)..(22): Xaa is Met, Leu or Nle
  MISC_FEATURE (23)..(23): Xaa is Asn or an acidic amino acid
  MISC_FEATURE (24)..(24): Xaa is Thr or an acidic amino acid
FTSXYSKYLXSRRAQDFVQWLXXX

SEQ ID NO: 1343 - protein, 24 aa, Artificial Sequence
  Synthetic Polypeptide
  MISC_FEATURE: Glucagon analogue
  MOD_RES (1)..(1): N-terminal amino group replaced with hydroxy group
  MISC_FEATURE (4)..(4): Xaa is aspartic acid, glutamic acid, cysteic acid or homocysteic acid
  MISC_FEATURE (10)..(10): Xaa is Asp, Glu, cysteic acid, homoglutamic acid or homocysteic acid
  MOD_RES (11)..(11): 20kDa PEG group attached to Xaa at position 11
  MISC_FEATURE (22)..(22): Xaa is Met, Leu or Nle
  MISC_FEATURE (23)..(23): Xaa is Asn or an acidic amino acid
  MISC_FEATURE (24)..(24): Xaa is Thr or an acidic amino acid
FTSXYSKYLXCRRAQDFVQWLXXX

SEQ ID NO: 1344 - protein, 24 aa, Artificial Sequence
  Synthetic Polypeptide
  MISC_FEATURE: Glucagon analogue
  MOD_RES (1)..(1): N-terminal amino group replaced with hydroxy group
  MISC_FEATURE (4)..(4): Xaa is aspartic acid, glutamic acid, cysteic acid or homocysteic acid
  MISC_FEATURE (10)..(10): Xaa is Asp, Glu, cysteic acid, homoglutamic acid or homocysteic acid
  MOD_RES (16)..(16): 20kDa PEG group attached to Xaa at position 16
  MISC_FEATURE (22)..(22): Xaa is Met, Leu or Nle
  MISC_FEATURE (23)..(23): Xaa is Asn or an acidic amino acid
  MISC_FEATURE (24)..(24): Xaa is Thr or an acidic amino acid
FTSXYSKYLXSRRAQCFVQWLXXX

SEQ ID NO: 1345 - protein, 24 aa, Artificial Sequence
  Synthetic Polypeptide
  MISC_FEATURE: Glucagon analogue
  MOD_RES (1)..(1): N-terminal amino group replaced with hydroxy group
  MISC_FEATURE (4)..(4): Xaa is aspartic acid, glutamic acid, cysteic acid or homocysteic acid
  MISC_FEATURE (10)..(10): Xaa is Asp, Glu, cysteic acid, homoglutamic acid or homocysteic acid
  MOD_RES (19)..(19): Pegylated
  MISC_FEATURE (22)..(22): Xaa is Met, Leu or Nle
  MISC_FEATURE (23)..(23): Xaa is Asn or an acidic amino acid
  MISC_FEATURE (24)..(24): Xaa is Thr or an acidic amino acid
FTSXYSKYLXSRRAQDFVCWLXXX

SEQ ID NO: 1346 - protein, 35 aa, Artificial Sequence
  Synthetic Polypeptide
  MISC_FEATURE: Glucagon analogue
  MOD_RES (1)..(1): N-terminal amino group replaced with hydroxy group
  MISC_FEATURE (4)..(4): Xaa is aspartic acid, glutamic acid, cysteic acid or homocysteic acid
  MISC_FEATURE (10)..(10): Xaa is Asp, Glu, cysteic acid, homoglutamic acid or homocysteic acid
  MISC_FEATURE (22)..(22): Xaa is Met, Leu or Nle
  MISC_FEATURE (23)..(23): Xaa is Asn or an acidic amino acid
  MISC_FEATURE (24)..(24): Xaa is Thr or an acidic amino acid
  MISC_FEATURE (25)..(25): Xaa is Lys, Cys, Orn, homocycstein or acetyl phenyalanine
  MOD_RES (25)..(25): Pegylated
FTSXYSKYLXSRRAQDFVQWLXXXXGPSSGAPPPS

SEQ ID NO: 1347 - protein, 35 aa, Artificial Sequence
  Synthetic Polypeptide
  MISC_FEATURE: Glucagon analogue
  MOD_RES (1)..(1): N-terminal amino group replaced with hydroxy group
  MISC_FEATURE (4)..(4): Xaa is aspartic acid, glutamic acid, cysteic acid or homocysteic acid
  MISC_FEATURE (10)..(10): Xaa is Asp, Glu, cysteic acid, homoglutamic acid or homocysteic acid
  MISC_FEATURE (22)..(22): Xaa is Met, Leu or Nle
  MISC_FEATURE (23)..(23): Xaa is Asn or an acidic amino acid
  MISC_FEATURE (24)..(24): Xaa is Thr or an acidic amino acid
  MISC_FEATURE (35)..(35): Xaa is Lys, Cys, Orn, homocysteine or acetyl phenyalanine
  MOD_RES (35)..(35): Pegylated
FTSXYSKYLXSRRAQDFVQWLXXXGPSSGAPPPSX

SEQ ID NO: 1348 - protein, 39 aa, Artificial Sequence
  Synthetic Polypeptide
  MISC_FEATURE: Glucagon analogue
HSQGTFTSDYSRYLDSRRAQDFVQWLMNTGPSSGAPPPS

SEQ ID NO: 1349 - protein, 35 aa, Artificial Sequence
  Synthetic Polypeptide
  MISC_FEATURE: Glucagon analogue
  MOD_RES (1)..(1): N-terminal amino group replaced with hydroxy group
  MISC_FEATURE (4)..(4): Xaa is aspartic acid, glutamic acid, cysteic acid or homocysteic acid
  MISC_FEATURE (7)..(7): Xaa is Lys or Arg
  MISC_FEATURE (22)..(22): Xaa is Met , Leu or Nle
  MISC_FEATURE (35)..(35): Xaa is Lys, Cys, Orn, homocysteine or acetyl phenyalanine
  MOD_RES (35)..(35): Pegylated
FTSXYSXYLDSRRAQDFVQWLXNTGPSSGAPPPSX

SEQ ID NO: 1350 - protein, 24 aa, Artificial Sequence
  Synthetic Polypeptide
  MISC_FEATURE: Glucagon analogue
  MOD_RES (1)..(1): N-terminal amino group replaced with hydroxy group
FTSEYSKYLDSRRAQDFVQWLMNT

SEQ ID NO: 1351 - protein, 20 aa, Artificial Sequence
  Synthetic Polypeptide
  MISC_FEATURE: Glucagon analogue
YSKYLDSRRAQDFVQWLMNT

SEQ ID NO: 1352 - protein, 24 aa, Artificial Sequence
  Synthetic Polypeptide
  MISC_FEATURE: Glucagon analogue
  MISC_FEATURE (4)..(4): Xaa is Homocysteic acid
FTSXYSKYLDSRRAQDFVQWLMNT

SEQ ID NO: 1353 - protein, 11 aa, Artificial Sequence
  Synthetic Polypeptide
  MISC_FEATURE: Peptide fragment representing the carboxy terminal 10 amino acids of Exendin-4
  MISC_FEATURE (11)..(11): Xaa is Lys, Cys, Orn, homocysteine or acetyl phenyalanine
GPSSGAPPPSX

SEQ ID NO: 1354 - protein, 6 aa, Artificial Sequence
  Synthetic Polypeptide
  MISC_FEATURE (6)..(6): Xaa is phenyl lactic acid
HSQGTX

SEQ ID NO: 1355 - protein, 5 aa, Artificial Sequence
  Synthetic Polypeptide
  MISC_FEATURE (5)..(5): Xaa is phenyl lactic acid
SQGTX

SEQ ID NO: 1356 - protein, 4 aa, Artificial Sequence
  Synthetic Polypeptide
  MISC_FEATURE (4)..(4): Xaa is phenyl lactic acid
QGTX

SEQ ID NO: 1357 - protein, 3 aa, Artificial Sequence
  Synthetic Polypeptide
  MISC_FEATURE (3)..(3): Xaa is phenyl lactic acid
GTX

SEQ ID NO: 1358 - protein, 2 aa, Artificial Sequence
  Synthetic Polypeptide
  MISC_FEATURE (2)..(2): Xaa is phenyl lactic acid
TX

SEQ ID NO: 1359 - protein, 6 aa, Artificial Sequence
  Synthetic Polypeptide
  MISC_FEATURE (1)..(1): Xaa is selected from a group consisting of His, D-histidine, alpha, alpha-dimethyl imidiazole acetic acid (DMIA), N-methyl histidine, alpha-methyl histidine, imidazole acetic acid, desaminohistidine, hydroxyl-histidine, acetyl-histidine and
  MISC_FEATURE (2)..(2): Xaa is selected from a group consisting of Ser, D-serine, D-alanine, Val, Gly, N-methyl serine, N-methyl alanine, and aminoisobutyric acid (AIB)
  MISC_FEATURE (3)..(3): Xaa is selected from a group consisting of Glu or Gln
  MISC_FEATURE (6)..(6): Xaa is phenyl lactic acid
XXXGTX

SEQ ID NO: 1360 - protein, 5 aa, Artificial Sequence
  Synthetic Polypeptide
  MISC_FEATURE (1)..(1): Xaa is selected from a group consisting of Ser, D-serine, D-alanine, Val, Gly, N-methyl serine, N-methyl alanine, and aminoisobutyric acid (AIB)
  MISC_FEATURE (2)..(2): Xaa is selected from a group consisting of Glu or Gln
  MISC_FEATURE (5)..(5): Xaa is phenyl lactic acid
XXGTX

SEQ ID NO: 1361 - protein, 4 aa, Artificial Sequence
  Synthetic Polypeptide
  MISC_FEATURE (1)..(1): Xaa is selected from a group consisting of Glu and Gln
  MISC_FEATURE (4)..(4): Xaa is phenyl lactic acid
XGTX

SEQ ID NO: 1362 - protein, 24 aa, Artificial Sequence
  Synthetic Polypeptide
  MOD_RES (1)..(1): N-terminal amino group replaced with hydroxy group
  MOD_RES (24)..(24): C-terminal alpha carboxylate optionally replaced with amide
FTSDYSKYLDSRRAQDFVQWLMDT

SEQ ID NO: 1363 - protein, 28 aa, Artificial Sequence
  Synthetic Polypeptide
  MOD_RES (28)..(28): C-terminal alpha carboxylate optionally replaced with amide
SQGTFTSEYSKYLDSRRAQDFVQWLMNT

SEQ ID NO: 1364 - protein, 28 aa, Artificial Sequence
  Synthetic Polypeptide
  MISC_FEATURE (4)..(5): Threonine in position 4 and phenyl lactic acid in position 5 linked via ester bond
  MISC_FEATURE (5)..(5): Xaa is phenyl lactic acid
  MOD_RES (28)..(28): Optional C-terminal alpha carboxylate replaced with amide
  MOD_RES (28)..(28): C-terminal alpha carboxylate optionally replaced with amide
SQGTXTSEYSKYLDSRRAQDFVQWLMNT

SEQ ID NO: 1365 - protein, 29 aa, Artificial Sequence
  Synthetic Polypeptide
  MISC_FEATURE (5)..(6): Threonine in position 5 and phenyl lactic acid in position 6 linked via ester bond
  MISC_FEATURE (6)..(6): Xaa is phenyl lactic acid
  MOD_RES (29)..(29): C-terminal alpha carboxylate optionally replaced with amide
HSQGTXTSEYSKYLDSRRAQDFVQWLMNT

SEQ ID NO: 1366 - protein, 24 aa, Artificial Sequence
  Synthetic Polypeptide
  MOD_RES (1)..(1): N-terminal amino group replaced with hydroxy group
  MISC_FEATURE (11)..(11): Xaa is amino isobutyric acid
FTSDYSKYLDXRRAQDFVQWLMNT

SEQ ID NO: 1367 - protein, 24 aa, Artificial Sequence
  Synthetic Polypeptide
  MOD_RES (1)..(1): N-terminal amino group replaced with hydroxy group
FTSDYSKYLDERRAQDFVQWLMNT

SEQ ID NO: 1368 - protein, 6 aa, Artificial Sequence
  Synthetic Polypeptide
  MISC_FEATURE (1)..(1): Xaa is selected from a group consisting of His, D-histidine, alpha, alpha-dimethyl imidiazole acetic acid (DMIA), N-methyl histidine, alpha-methyl histidine, imidazole acetic acid, desaminohistidine, hydroxyl-histidine, acetyl-histidine and
  MISC_FEATURE (2)..(2): Xaa is selected from a group consisting of Ser, D-serine, D-alanine, Val, Gly, N-methyl serine, N-methyl alanine, and aminoisobutyric acid (AIB)
  MISC_FEATURE (3)..(3): Xaa is selected from a group consisting of Glu or Gln
XXXTGF

SEQ ID NO: 1369 - protein, 5 aa, Artificial Sequence
  Synthetic Polypeptide
  MISC_FEATURE (1)..(1): Xaa is selected from a group consisting of Ser, D-serine, D-alanine, Val, Gly, N-methyl serine, N-methyl alanine, and aminoisobutyric acid (AIB)
  MISC_FEATURE (2)..(2): Xaa is selected from a group consisting of Glu or Gln
XXTGF

SEQ ID NO: 1370 - protein, 4 aa, Artificial Sequence
  Synthetic Polypeptide
  MISC_FEATURE (1)..(1): Xaa is selected from a group consisting of Glu or Gln
XTGF

SEQ ID NO: 1371 - protein, 24 aa, Artificial Sequence
  Synthetic Polypeptide
  MOD_RES (1)..(1): N-terminal amino group replaced with hydroxy group
  MISC_FEATURE (24)..(24): C-terminal alpha carboxylate optionally replaced with an amide
FTSEYSKYLDSRRAQDFVQWLMNT

SEQ ID NO: 1372-1400 - skipped (29 entries)

SEQ ID NO: 1401 - protein, 29 aa, Homo sapiens
HSQGTFTSDYSKYLDSRRAQDFVQWLMNT

SEQ ID NO: 1402 - protein, 24 aa, Artificial Sequence
  Synthetic Polypeptide
  MISC_FEATURE: Glucagon analogue
  MOD_RES (1)..(1): N-terminal amino group replaced with hydroxy group
FTSDYSKYLDSRRAQDFVQWLMNT

SEQ ID NO: 1403 - protein, 31 aa, Homo sapiens; identical to SEQ ID NO: 703

SEQ ID NO: 1404 - protein, 30 aa, Homo sapiens; identical to SEQ ID NO: 704

SEQ ID NO: 1405 - protein, 24 aa, Artificial Sequence
  Synthetic Polypeptide
  MISC_FEATURE: Glucagon analogue
  MOD_RES (1)..(1): N-terminal amino group replaced with hydroxy group
FTSDYSKYLDERRAQDFVQWLMNT

SEQ ID NO: 1406 - protein, 24 aa, Artificial Sequence
  Synthetic Polypeptide
  MOD_RES (1)..(1): N-terminal amino group replaced with hydroxy group
FTSDYSKYLDERRAKDFVQWLMNT

SEQ ID NO: 1407 - protein, 24 aa, Artificial Sequence
  Synthetic Polypeptide
  MISC_FEATURE: Glucagon analogue
  MOD_RES (1)..(1): N-terminal amino group replaced with hydroxy group
  MISC_FEATURE (11)..(11): Xaa is Ser or Glu
FTSDYSKYLDXRRAKDFVEWLMNT

SEQ ID NO: 1408 - protein, 24 aa, Artificial Sequence
  Synthetic Polypeptide
  MISC_FEATURE: Glucagon analogue
  MOD_RES (1)..(1): N-terminal amino group replaced with hydroxy group
  MISC_FEATURE (11)..(11): Xaa is Ser or Glu
FTSDYSKYLDXRRAQDFVEWLMKT

SEQ ID NO: 1409 - protein, 24 aa, Artificial Sequence
  Synthetic Polypeptide
  MISC_FEATURE: Glucagon analogue
  MOD_RES (1)..(1): N-terminal amino group replaced with hydroxy group
  MISC_FEATURE (7)..(7): Xaa at position 7 is Lys or Glu
  MISC_FEATURE (10)..(10): Xaa is Asp, Glu, homoglutamic acid, cysteic acid or homocysteic acid
  MISC_FEATURE (11)..(11): Xaa is Ala, Ser, Glu, Lys, homoglutamic acid or homocysteic acid
  MISC_FEATURE (15)..(15): Xaa is Gln, Glu or Lys
  MISC_FEATURE (19)..(19): Xaa is Ala, Gln, Lys or Glu
  MISC_FEATURE (23)..(23): Xaa is Asn, Lys or an acidic amino acid
  MISC_FEATURE (24)..(24): Xaa is Thr or an acidic amino acid
FTSDYSXYLXXRRAXDFVXWLMXX

SEQ ID NO: 1410 - protein, 24 aa, Artificial Sequence
  Synthetic Polypeptide
  MISC_FEATURE: Glucagon analogue
  MOD_RES (1)..(1): N-terminal amino group replaced with hydroxy group
  MISC_FEATURE (11)..(11): Xaa is Ala, Ser, Glu, Gln, homoglutamic acid or homocysteic acid
  MISC_FEATURE (15)..(15): Xaa is Gln or Lys
  MISC_FEATURE (19)..(19): Xaa is Ala, Gln or Glu
  MISC_FEATURE (23)..(23): Xaa is Asn, Lys or an acidic amino acid
FTSDYSKYLDXRRAXDFVXWLMXT

SEQ ID NO: 1411 - protein, 24 aa, Artificial Sequence
  Synthetic Polypeptide
  MISC_FEATURE: Glucagon analogue
  MOD_RES (1)..(1): N-terminal amino group replaced with hydroxy group
  MISC_FEATURE (11)..(11): Xaa is Ala, Ser, Glu, Gln, homoglutamic acid or homocysteic acid
  MISC_FEATURE (15)..(15): Xaa is Gln or Lys
FTSDYSKYLDXRRAXDFVQWLMNT

SEQ ID NO: 1412 - protein, 24 aa, Artificial Sequence
  Synthetic Polypeptide
  MISC_FEATURE: Glucagon analogue
  MOD_RES (1)..(1): N-terminal amino group replaced with hydroxy group
  MISC_FEATURE (4)..(4): Xaa is aspartic acid, glutamic acid, cysteic acid or homocysteic acid
  MISC_FEATURE (7)..(7): Xaa is Lys or Arg
  MISC_FEATURE (15)..(15): Xaa is Lys or Gln
  MISC_FEATURE (16)..(16): Xaa is Lys, Cys, Orn, homocysteine or acetyl phenyalanine
  MOD_RES (16)..(16): Pegylated
  MISC_FEATURE (19)..(19): Xaa is Lys, Cys, Orn, homocysteine or acetyl phenylalanine
  MOD_RES (19)..(19): Pegylated
  MISC_FEATURE (22)..(22): Xaa is Met, Leu or Nle
FTSXYSXYLDERRAXXFVXWLXNT

SEQ ID NO: 1413 - protein, 24 aa, Artificial Sequence
  Synthetic Polypeptide
  MISC_FEATURE: Glucagon analogue
  MOD_RES (1)..(1): N-terminal amino group replaced with hydroxy group
  MISC_FEATURE (4)..(4): Xaa is aspartic acid, glutamic acid, cysteic acid or homocysteic acid
  MISC_FEATURE (15)..(15): Xaa is Lys or Gln
  MISC_FEATURE (16)..(16): Xaa is Cys, Orn, homocysteine or acetyl phenyalanine
  MOD_RES (16)..(16): Pegylated
  MISC_FEATURE (22)..(22): Xaa is Met, Leu or Nle
FTSXYSKYLDERRAXXFVQWLXNT

SEQ ID NO: 1414 - protein, 24 aa, Artificial Sequence
  Synthetic Polypeptide
  MISC_FEATURE: Glucagon analogue
  MOD_RES (1)..(1): N-terminal amino group replaced with hydroxy group
  MISC_FEATURE (4)..(4): Xaa is aspartic acid, glutamic acid, cysteic acid or homocysteic acid
  MISC_FEATURE (15)..(15): Xaa is Lys or Gln
  MISC_FEATURE (19)..(19): Xaa is Cys, Orn, homocysteine or acetyl phenylalanine
  MOD_RES (19)..(19): Pegylated
  MISC_FEATURE (22)..(22): Xaa is Met, Leu or Nle
FTSXYSKYLDERRAXDFVXWLXNT

SEQ ID NO: 1415 - protein, 24 aa, Artificial Sequence
  Synthetic Polypeptide
  MISC_FEATURE: Glucagon analogue
  MOD_RES (1)..(1): N-terminal amino group replaced with hydroxy group
  MISC_FEATURE (4)..(4): Xaa is aspartic acid, glutamic acid, cysteic acid, homoglutamic acid or homocysteic acid
  MISC_FEATURE (7)..(7): Xaa is Lys or Glu
  MISC_FEATURE (10)..(10): Xaa is Asp, Glu, cysteic acid, homoglutamic acid or homocysteic acid
  MISC_FEATURE (11)..(11): Xaa is Ala, Ser, Glu, Lys Gln, homoglutamic acid or homocysteic acid
  MISC_FEATURE (15)..(15): Xaa is Arg, Gln, Glu or Lys
  MISC_FEATURE (19)..(19): Xaa is Ala, Gln, Lys or Glu
  MISC_FEATURE (22)..(22): Xaa is Met, Leu or Nle
  MISC_FEATURE (23)..(23): Xaa is Asn, Lys or an acidic amino acid
  MISC_FEATURE (24)..(24): Xaa is Thr or an acidic amino acid
FTSXYSXYLXXRRAXDFVXWLXXX

SEQ ID NO: 1416 - protein, 24 aa, Artificial Sequence
  Synthetic Polypeptide
  MISC_FEATURE: Glucagon analogue
  MOD_RES (1)..(1): N-terminal amino group replaced with hydroxy group
  MISC_FEATURE (7)..(11): Lactam bridge connecting residues 7 and 11
  MISC_FEATURE (10)..(10): Xaa is Glu or Asp
  MISC_FEATURE (22)..(22): Xaa is Met, Leu or Nle
  MISC_FEATURE (23)..(23): Xaa is Asn, Asp or Glu
  MOD_RES (24)..(24): C-terminal alpha carboxylate replaced with amide
FTSDYSKYLXERRAQDFVQWLXXT

SEQ ID NO: 1417 - protein, 24 aa, Artificial Sequence
  Synthetic Polypeptide
  MISC_FEATURE: Glucagon analogue
  MOD_RES (1)..(1): N-terminal amino group replaced with hydroxy group
  MISC_FEATURE (10)..(10): Xaa is Asp or Glu
  MISC_FEATURE (11)..(15): Lactam bridge connecting residues 11 and 15
  MISC_FEATURE (22)..(22): Xaa is Met, Leu or Nle
  MISC_FEATURE (23)..(23): Xaa is Asn, Asp or Glu
  MOD_RES (24)..(24): C-terminal alpha carboxylate replaced with amide
FTSDYSKYLXERRAKDFVQWLXXT

SEQ ID NO: 1418 - protein, 24 aa, Artificial Sequence
  Synthetic Polypeptide
  MISC_FEATURE: Glucagon analogue
  MOD_RES (1)..(1): N-terminal amino group replaced with hydroxy group
  MISC_FEATURE (10)..(10): Xaa is Asp or Glu
  MISC_FEATURE (11)..(11): Xaa is Ser or Glu
  MISC_FEATURE (15)..(19): Lactam bridge connecting residues 15 and 19
  MISC_FEATURE (22)..(22): Xaa is Met, Leu or Nle
  MISC_FEATURE (23)..(23): Xaa is Asn, Asp or Glu
  MOD_RES (24)..(24): C-terminal alpha carboxylate replaced with amide
FTSDYSKYLXXRRAKDFVEWLXXT

SEQ ID NO: 1419 - protein, 24 aa, Artificial Sequence
  Synthetic Polypeptide
  MISC_FEATURE: Glucagon analogue
  MOD_RES (1)..(1): N-terminal amino group replaced with hydroxy group
  MISC_FEATURE (10)..(10): Xaa is Asp or Glu
  MISC_FEATURE (11)..(11): Xaa is Ser or Glu
  MISC_FEATURE (19)..(23): Lactam bridge connecting residues 19 and 23
  MISC_FEATURE (22)..(22): Xaa is Met, Leu or Nle
  MISC_FEATURE (24)..(24): Xaa is Thr or Glu
  MOD_RES (24)..(24): C-terminal alpha carboxylate replaced with amide
FTSDYSKYLXXRRAQDFVEWLXKX

SEQ ID NO: 1420 - protein, 24 aa, Artificial Sequence
  Synthetic Polypeptide
  MISC_FEATURE: Glucagon analogue
  MOD_RES (1)..(1): N-terminal amino group replaced with hydroxy group
  MISC_FEATURE (4)..(4): Xaa is aspartic acid, glutamic acid, cysteic acid or homocysteic acid
  MISC_FEATURE (7)..(7): Xaa is Lys or Glu
  MISC_FEATURE (10)..(10): Xaa is Asp, Glu, cysteic acid, homoglutamic acid or homocysteic acid
  MISC_FEATURE (11)..(11): Xaa is Ala, Ser, Glu, Lys Gln, homoglutamic acid or homocysteine
  MISC_FEATURE (15)..(15): Xaa is Arg, Gln, Glu or Lys
  MISC_FEATURE (19)..(19): Xaa is Ala, Gln, Lys or Glu
  MISC_FEATURE (22)..(22): Xaa is Met, Leu or Nle
  MISC_FEATURE (23)..(23): Xaa is Asn, Lys, Asp, Glu, cysteic acid or homocysteic acid
  MISC_FEATURE (24)..(24): Xaa is Thr, Asp, Glu, cysteic acid and homocysteic acid
FTSXYSXYLXXRRAXDFVXWLXXX

SEQ ID NO: 1421 - protein, 10 aa, Artificial Sequence
  Synthetic Polypeptide
  MISC_FEATURE: Peptide fragment representing the carboxy terminal 10 amino acids of Exendin-4
GPSSGAPPPS

SEQ ID NO: 1422 - protein, 24 aa, Artificial Sequence
  Synthetic Polypeptide
  MISC_FEATURE: Glucagon analogue
  MOD_RES (1)..(1): N-terminal amino group replaced with hydroxy group
  MISC_FEATURE (4)..(4): Xaa is aspartic acid, glutamic acid, cysteic acid or homocysteic acid
  MISC_FEATURE (7)..(11): Lactam bridge connecting residues 7 and 11
  MISC_FEATURE (10)..(10): Xaa is Asp, Glu, cysteic acid, homoglutamic acid and homocysteic acid
  MISC_FEATURE (22)..(22): Xaa is Met, Leu or Nle
FTSXYSKYLXERRAQDFVQWLXNT

SEQ ID NO: 1423 - protein, 24 aa, Artificial Sequence
  Synthetic Polypeptide
  MISC_FEATURE: Glucagon analogue
  MOD_RES (1)..(1): N-terminal amino group replaced with hydroxy group
  MISC_FEATURE (4)..(4): Xaa is aspartic acid, glutamic acid, cysteic acid or homocysteic acid
  MISC_FEATURE (10)..(10): Xaa is Asp, Glu, cysteic acid, homoglutamic acid and homocysteic acid
  MISC_FEATURE (11)..(15): Lactam bridge connecting residues 11 and 15
  MISC_FEATURE (22)..(22): Xaa is Met, Leu or Nle
FTSXYSKYLXERRAKDFVQWLXNT

SEQ ID NO: 1424 - protein, 24 aa, Artificial Sequence
  Synthetic Polypeptide
  MISC_FEATURE: Glucagon analogue
  MOD_RES (1)..(1): N-terminal amino group replaced with hydroxy group
  MISC_FEATURE (4)..(4): Xaa is aspartic acid, glutamic acid, cysteic acid or homocysteic acid
  MISC_FEATURE (10)..(10): Xaa is Asp, Glu, cysteic acid, homoglutamic acid and homocysteic acid
  MISC_FEATURE (15)..(19): Lactam bridge connecting residues 15 and 19
  MISC_FEATURE (22)..(22): Xaa is Met, Leu or Nle
FTSXYSKYLXERRAKDFVEWLXNT

SEQ ID NO: 1425 - protein, 24 aa, Artificial Sequence
  Synthetic Polypeptide
  MISC_FEATURE: Glucagon analogue
  MOD_RES (1)..(1): N-terminal amino group replaced with hydroxy group
  MISC_FEATURE (4)..(4): Xaa is aspartic acid, glutamic acid, cysteic acid or homocysteic acid
  MISC_FEATURE (10)..(10): Xaa is Asp, Glu, cysteic acid, homoglutamic acid and homocysteic acid
  MISC_FEATURE (19)..(24): Lactam bridge connecting residues 19 and 24
  MISC_FEATURE (22)..(22): Xaa is Met, Leu or Nle
FTSXYSKYLXERRAQDFVEWLXKT

SEQ ID NO: 1426 - protein, 8 aa, Artificial Sequence
  Synthetic Polypeptide
  MISC_FEATURE: Peptide fragment representing the carboxy terminal 8 amino acids of oxyntomodulin
KRNRNNIA

SEQ ID NO: 1427 - protein, 4 aa, Artificial Sequence
  Synthetic Polypeptide
  MISC_FEATURE: Peptide fragment representing the carboxy 4 amino acids of oxyntomodulin carboxy terminus
KRNR

SEQ ID NO: 1428 - protein, 34 aa, Artificial Sequence
  Synthetic Polypeptide
  MISC_FEATURE: Glucagon analogue
FTSEYSKYLDERRAQDFVQWLMNTGPSSGAPPPS

SEQ ID NO: 1429 - protein, 34 aa, Artificial Sequence; identical to SEQ ID NO: 1428
  Synthetic Polypeptide
  MISC_FEATURE (7)..(11): Lactam bridge connecting residues 7 and 11

SEQ ID NO: 1430 - protein, 34 aa, Artificial Sequence
  Synthetic Polypeptide
  MISC_FEATURE: Glucagon analogue
  MISC_FEATURE (11)..(15): Lactam bridge connecting residues 11 and 15
FTSEYSKYLDERRAKDFVQWLMNTGPSSGAPPPS

SEQ ID NO: 1431 - protein, 34 aa, Artificial Sequence
  Synthetic Polypeptide
  MISC_FEATURE: Glucagon analogue
  MISC_FEATURE (7)..(11): Lactam bridge connecting residues 7 and 11
FTSDYSKYLDERRAQDFVQWLMNTGPSSGAPPPS

SEQ ID NO: 1432 - protein, 34 aa, Artificial Sequence; identical to SEQ ID NO: 1428
  Synthetic Polypeptide
  MISC_FEATURE: Glucagon analogue
  MOD_RES (1)..(1): N-terminal amino group replaced with hydroxy group
  MISC_FEATURE (7)..(11): Lactam bridge connecting residues 7 and 11

SEQ ID NO: 1433 - protein, 34 aa, Artificial Sequence; identical to SEQ ID NO: 1430
  Synthetic Polypeptide
  MISC_FEATURE: Glucagon analogue
  MOD_RES (1)..(1): N-terminal amino group replaced with hydroxy group
  MISC_FEATURE (11)..(15): Lactam bridge connecting residues 11 and 15

SEQ ID NO: 1434 - protein, 24 aa, Artificial Sequence
  Synthetic Polypeptide
  MISC_FEATURE: Glucagon analogue
  MOD_RES (1)..(1): N-terminal amino group replaced with hydroxy group
FTSDYSKYLDSRRAQDFVQWLMDT

SEQ ID NO: 1435 - protein, 24 aa, Artificial Sequence
  Synthetic Polypeptide
  MISC_FEATURE: Glucagon analogue
  MOD_RES (1)..(1): N-terminal amino group replaced with hydroxy group
  MISC_FEATURE (7)..(11): Lactam bridge connecting residues 7 and 11
FTSEYSKYLDERRAQDFVQWLMNT

SEQ ID NO: 1436 - protein, 24 aa, Artificial Sequence
  Synthetic Polypeptide
  MISC_FEATURE: Glucagon analogue
  MOD_RES (1)..(1): N-terminal amino group replaced with hydroxy group
  MISC_FEATURE (11)..(15): Lactam bridge connecting residues 11 and 15
FTSEYSKYLDERRAKDFVQWLMNT

SEQ ID NO: 1437 - protein, 31 aa, Artificial Sequence
  Synthetic Polypeptide
  MISC_FEATURE: Glucagon analogue
HSQGTFTSDYARYLDARRAREFIKWLVRGRG

SEQ ID NO: 1438 - protein, 24 aa, Artificial Sequence
  Synthetic Polypeptide
  MISC_FEATURE: Glucagon analogue
  MOD_RES (1)..(1): N-terminal amino group replaced with hydroxy group
  MOD_RES (24)..(24): C-terminal alpha carboxylate replaced with amide
FTSDYSKYLDERRAQDFVQWLMNT

SEQ ID NO: 1439 - protein, 24 aa, Artificial Sequence
  Synthetic Polypeptide
  MISC_FEATURE: Glucagon analogue
  MOD_RES (1)..(1): N-terminal amino group replaced with hydroxy group
  MISC_FEATURE (4)..(4): Xaa is aspartic acid, glutamic acid, cysteic acid or homocysteic acid
  MISC_FEATURE (10)..(10): Xaa is Asp, Glu, cysteic acid, homoglutamic acid or homocysteic acid
  MISC_FEATURE (22)..(22): Xaa is Met, Leu or Nle
  MOD_RES (24)..(24): C-terminal alpha carboxylate replaced with amide
FTSXYSKYLXERRAKDFVQWLXNT

SEQ ID NO: 1440 - protein, 29 aa, Artificial Sequence
  Synthetic Polypeptide
  MISC_FEATURE: Glucagon analogue
HSQGTFTSDYSKYLDSCRAQDFVQWLMNT

SEQ ID NO: 1441 - protein, 39 aa, Artificial Sequence; identical to SEQ ID NO: 521
  Synthetic Polypeptide
  MISC_FEATURE: Glucagon Analogue

SEQ ID NO: 1442 - protein, 29 aa, Artificial Sequence
  Synthetic Polypeptide
  MISC_FEATURE: Glucagon analogue
  MOD_RES (24)..(24): 2-butyrolactone bound through thiol group of Cysteine
HSQGTFTSDYSKYLDSRRAQCFVQWLMNT

SEQ ID NO: 1443 - protein, 29 aa, Artificial Sequence
  Synthetic Polypeptide
  MISC_FEATURE: Glucagon Analogue
  MOD_RES (21)..(21): Carboxymethyl group bound through thiol group of Cysteine
HSQGTFTSDYSKYLDSRRAQCFVQWLMNT

SEQ ID NO: 1444 - protein, 39 aa, Homo sapiens
HSQGTFTSDYSRYLDSRRAQDFVQWLRNTGPSSGAPPPS

SEQ ID NO: 1445 - protein, 35 aa, Artificial Sequence; identical to SEQ ID NO: 1346
  Synthetic Polypeptide
  MISC_FEATURE: Glucagon analogue
  MOD_RES (1)..(1): N-terminal amino group replaced with hydroxy group
  MISC_FEATURE (4)..(4): Xaa is aspartic acid, glutamic acid, cysteic acid or homocysteic acid
  MISC_FEATURE (7)..(11): Lactam bridge connecting residues 7 and 11
  MISC_FEATURE (10)..(10): Xaa is Asp, Glu, cysteic acid, homoglutamic acid or homocysteic acid
  MISC_FEATURE (22)..(22): Xaa is Met, Leu or Nle
  MISC_FEATURE (23)..(23): Xaa is Asn, Lys, Asp, Glu, cysteic acid and homocysteic acid
  MISC_FEATURE (24)..(24): Xaa is Thr, Asp, Glu, cysteic acid and homocysteic acid
  MISC_FEATURE (25)..(25): Xaa is Cys, Orn, homocysteine or acetyl phenyalanine
  MOD_RES (25)..(25): Pegylated

SEQ ID NO: 1446 - protein, 35 aa, Artificial Sequence; identical to SEQ ID NO: 1347
  Synthetic Polypeptide
  MISC_FEATURE: Glucagon analogue
  MOD_RES (1)..(1): N-terminal amino group replaced with hydroxy group
  MISC_FEATURE (4)..(4): Xaa is aspartic acid, glutamic acid, cysteic acid or homocysteic acid
  MISC_FEATURE (10)..(10): Xaa is Asp, Glu, cysteic acid, homoglutamic acid or homocysteic acid
  MISC_FEATURE (11)..(15): Lactam bridge connecting residues 11 and 15
  MISC_FEATURE (22)..(22): Xaa is Met, Leu or Nle
  MISC_FEATURE (23)..(23): Xaa is Asn, Lys, Asp, Glu, cysteic acid and homocysteic acid
  MISC_FEATURE (24)..(24): Xaa is Thr, Asp, Glu, cysteic acid and homocysteic acid
  MISC_FEATURE (35)..(35): Xaa is Cys, Orn, homocysteine or acetyl phenyalanine
  MOD_RES (35)..(35): Pegylated

SEQ ID NO: 1447 - protein, 24 aa, Artificial Sequence
  Synthetic Polypeptide
  MISC_FEATURE: Glucagon analogue
  MISC_FEATURE (4)..(4): Xaa is glutamic acid, homoglutamic acid, cysteic acid or homocysteic acid
  MISC_FEATURE (7)..(11): Lactam bridge connecting residues 7 and 11
  MISC_FEATURE (10)..(10): Xaa is Glu or Asp
  MISC_FEATURE (22)..(22): Xaa is Met, Leu or Nle
  MISC_FEATURE (23)..(23): Xaa is Asn, Asp or Glu
FTSXYSKYLXERRAQDFVQWLXXT

SEQ ID NO: 1448 - protein, 24 aa, Artificial Sequence
  Synthetic Polypeptide
  MISC_FEATURE: Glucagon analogue
  MISC_FEATURE (4)..(4): Xaa is glutamic acid, homoglutamic acid,  cysteic acid or homocysteic acid
  MISC_FEATURE (10)..(10): Xaa is Asp or Glu
  MISC_FEATURE (11)..(15): Lactam bridge connecting residues 11 and 15
  MISC_FEATURE (22)..(22): Xaa is Met, Leu or Nle
  MISC_FEATURE (23)..(23): Xaa is Asn, Asp or Glu
FTSXYSKYLXERRAKDFVQWLXXT

SEQ ID NO: 1449 - protein, 23 aa, Artificial Sequence
  Synthetic Polypeptide
  MISC_FEATURE: Glucagon analogue
TSDYSKYLDERRAKDFVQWLMDT

SEQ ID NO: 1450 - protein, 11 aa, Artificial Sequence
  Synthetic Polypeptide
  MISC_FEATURE: Peptide fragment representing the carboxy terminal 10 amino acids of Exendin-4 plus one additional amino acid
  MISC_FEATURE (11)..(11): Xaa is selected form the group consisting of Cys, Orn, Lys, homocysteine and acetyl phenyalanine
GPSSGAPPPSX

SEQ ID NO: 1451 - protein, 24 aa, Artificial Sequence
  Synthetic Polypeptide
  MISC_FEATURE: Glucagon analogue
  MOD_RES (1)..(1): N-terminal amino group replaced with hydroxy group
  MISC_FEATURE (4)..(4): Xaa is aspartic acid, glutamic acid, cysteic acid, homoglutamic acid or homocysteic acid
  MISC_FEATURE (7)..(7): Xaa is Lys or Glu
  MISC_FEATURE (10)..(10): Xaa is Asp, Glu, cysteic acid, homoglutamic acid or homocysteic acid
  MISC_FEATURE (11)..(11): Xaa is Ala, Ser, Glu, Lys Gln, homoglutamic acid or homocysteic acid
  MISC_FEATURE (15)..(15): Xaa is Arg, Gln, Glu or Lys
  MISC_FEATURE (19)..(19): Xaa is Ala, Gln, Lys or Glu
  MISC_FEATURE (22)..(22): Xaa is Met, Leu or Nle
  MISC_FEATURE (23)..(23): Xaa is Asn, Lys or an acidic amino acid
  MISC_FEATURE (24)..(24): Xaa is Thr, Gly or an acidic amino acid
FTSXYSXYLXXRRAXDFVXWLXXX

SEQ ID NO: 1452 - protein, 6 aa, Artificial Sequence
  Synthetic Polypeptide
  MISC_FEATURE (6)..(6): Xaa is phenyl lactic acid
HSQGTX

SEQ ID NO: 1453 - protein, 5 aa, Artificial Sequence
  Synthetic Polypeptide
  MISC_FEATURE (5)..(5): Xaa is phenyl lactic acid
SQGTX

SEQ ID NO: 1454 - protein, 4 aa, Artificial Sequence
  Synthetic Polypeptide
  MISC_FEATURE (4)..(4): Xaa is phenyl lactic acid
QGTX

SEQ ID NO: 1455 - protein, 3 aa, Artificial Sequence
  Synthetic Polypeptide
  MISC_FEATURE (3)..(3): Xaa is phenyl lactic acid
GTX

SEQ ID NO: 1456 - protein, 2 aa, Artificial Sequence
  Synthetic Polypeptide
  MISC_FEATURE (2)..(2): Xaa is phenyl lactic acid
TX

SEQ ID NO: 1457 - protein, 6 aa, Artificial Sequence
  Synthetic Polypeptide
  MISC_FEATURE (1)..(1): Xaa is selected from a group consisting of His, D-histidine, alpha, alpha-dimethyl imidiazole acetic acid (DMIA), N-methyl histidine, alpha-methyl histidine, imidazole acetic acid, desaminohistidine, hydroxyl-histidine, acetyl-histidine and
  MISC_FEATURE (2)..(2): Xaa is selected from a group consisting of Ser, D-serine, D-alanine, Val, Gly, N-methyl serine, N-methyl alanine, and aminoisobutyric acid (AIB)
  MISC_FEATURE (3)..(3): Xaa is selected from a group consisting of Glu or Gln
  MISC_FEATURE (6)..(6): Xaa is phenyl lactic acid
XXXGTX

SEQ ID NO: 1458 - protein, 5 aa, Artificial Sequence
  Synthetic Polypeptide
  MISC_FEATURE (1)..(1): Xaa is selected from a group consisting of Ser, D-serine, D-alanine, Val, Gly, N-methyl serine, N-methyl alanine, and aminoisobutyric acid (AIB)
  MISC_FEATURE (2)..(2): Xaa is selected from a group consisting of Glu or Gln
  MISC_FEATURE (5)..(5): Xaa is phenyl lactic acid
XXGTX

SEQ ID NO: 1459 - protein, 4 aa, Artificial Sequence
  Synthetic Polypeptide
  MISC_FEATURE (1)..(1): Xaa is selected from a group consisting of Glu or Gln
  MISC_FEATURE (4)..(4): Xaa is phenyl lactic acid
XGTX

SEQ ID NO: 1460 - protein, 24 aa, Artificial Sequence
  Synthetic Polypeptide
  MOD_RES (1)..(1): N-terminal amino group replaced with hydroxy group
  MISC_FEATURE (11)..(15): Lactam bridge connecting residues 11 and 15
  MOD_RES (24)..(24): C-terminal alpha carboxylate replaced with amide
FTSDYSKYLDERRAKDFVQWLMDT

SEQ ID NO: 1461 - protein, 24 aa, Artificial Sequence
  Synthetic Polypeptide
  MOD_RES (1)..(1): N-terminal amino group replaced with hydroxy group
  MOD_RES (24)..(24): C-terminal alpha carboxylate replaced with amide
FTSEYSKYLDSRRAQDFVQWLMNT

SEQ ID NO: 1462 - protein, 24 aa, Artificial Sequence
  Synthetic Polypeptide
  MOD_RES (1)..(1): N-terminal amino group replaced with hydroxy group
  MISC_FEATURE (4)..(7): Lactam bridge connecting residues 4 and 7
  MOD_RES (24)..(24): C-terminal alpha carboxylate replaced with amide
FTSEYSKYLDSRRAQDFVQWLMNT

SEQ ID NO: 1463 - protein, 28 aa, Artificial Sequence
  Synthetic Polypeptide
  MISC_FEATURE (15)..(19): Lactam bridge connecting residues 15 and 19
  MOD_RES (28)..(28): C-terminal alpha carboxylate replaced with amide
AEGTFTSEYSKYLDERRAKDFVQWLMDT

SEQ ID NO: 1464 - protein, 28 aa, Artificial Sequence
  Synthetic Polypeptide
  MISC_FEATURE (4)..(5): Threonine in position 4 and phenyl lactic acid in position 5 are linked via ester bond
  MISC_FEATURE (5)..(5): Xaa is phenyl lactic acid
  MISC_FEATURE (15)..(19): Lactam bridge connecting residues 15 and 19
  MOD_RES (28)..(28): C-terminal alpha carboxylate replaced with amide
AEGTXTSDYSKYLDERRAKDFVQWLMDT

SEQ ID NO: 1465 - protein, 28 aa, Artificial Sequence
  Synthetic Polypeptide
  MISC_FEATURE (15)..(19): Lactam bridge connecting residues 15 and 19
  MOD_RES (28)..(28): C-terminal alpha carboxylate replaced with amide
SQGTFTSEYSKYLDERRAKDFVQWLMDT

SEQ ID NO: 1466 - protein, 28 aa, Artificial Sequence
  Synthetic Polypeptide
  MISC_FEATURE (4)..(5): Threonine in position 4 and phenyl lactic acid in position 5 are linked via ester bond
  MISC_FEATURE (5)..(5): Xaa is phenyl lactic acid
  MISC_FEATURE (15)..(19): Lactam bridge connecting residues 15 and 19
  MOD_RES (28)..(28): C-terminal alpha carboxylate replaced with amide
SQGTXTSDYSKYLDERRAKDFVQWLMDT

SEQ ID NO: 1467 - protein, 24 aa, Artificial Sequence
  Synthetic Polypeptide
  MOD_RES (1)..(1): N-terminal amino group replaced with hydroxy group
  MISC_FEATURE (5)..(5): Covalently linked to a cholesterol acid moiety
  MISC_FEATURE (11)..(15): Lactam bridge connecting residues 11 to 15
  MOD_RES (24)..(24): C-terminal alpha carboxylate replaced with amide
FTSDKSKYLDERRAKDFVQWLMDT

SEQ ID NO: 1468 - protein, 25 aa, Artificial Sequence
  Synthetic Polypeptide
  MOD_RES (1)..(1): N-terminal amino group replaced with hydroxy group
  MISC_FEATURE (11)..(15): Lactam bridge connecting residues 11 and 15
  MISC_FEATURE (25)..(25): Covalently linked to a cholesterol acid moiety
  MOD_RES (25)..(25): C-terminal alpha carboxylate replaced with amide
FTSDYSKYLDERRAKDFVQWLMDTK

SEQ ID NO: 1469 - protein, 35 aa, Artificial Sequence
  Synthetic Polypeptide
  MOD_RES (1)..(1): N-terminal amino group replaced with hydroxy group
  MISC_FEATURE (11)..(15): Lactam bridge connectiong residues 11 and 15
  MISC_FEATURE (35)..(35): Covalently linked to a cholesterol acid moiety
  MOD_RES (35)..(35): C-terminal alpha carboxylate replaced with amide
FTSDYSKYLDERRAKDFVQWLMDTGPSSGAPPPSK

SEQ ID NO: 1470 - protein, 28 aa, Artificial Sequence
  Synthetic Polypeptide
  MISC_FEATURE (1)..(1): Xaa is amino isobutyric acid
  MISC_FEATURE (4)..(5): Threonine in position 4 and phenyl lactic acid in position 5 are linked via ester bond
  MISC_FEATURE (5)..(5): Xaa is phenyl lactic acid
  MISC_FEATURE (15)..(19): Lactam bridge connectiong residues 15 and 19
  MOD_RES (28)..(28): C-terminal alpha carboxylate replaced with amide
XEGTXTSDYSKYLDERRAKDFVQWLMDT

SEQ ID NO: 1471 - protein, 34 aa, Artificial Sequence; identical to SEQ ID NO: 1428
  Synthetic Polypeptide
  MOD_RES (34)..(34): C-terminal alpha carboxylate replaced with amide

SEQ ID NO: 1472 - protein, 34 aa, Artificial Sequence; identical to SEQ ID NO: 1428
  Synthetic Polypeptide
  MOD_RES (1)..(1): N-terminal amino group replaced with hydroxy group
  MOD_RES (34)..(34): C-terminal alpha carboxylate replaced with amide

SEQ ID NO: 1473 - protein, 34 aa, Artificial Sequence; identical to SEQ ID NO: 1430
  Synthetic Polypeptide
  MISC_FEATURE (11)..(15): Lactam bridge connecting residues 11 and 15
  MOD_RES (34)..(34): C-terminal alpha carboxylate replaced with amide

SEQ ID NO: 1474 - protein, 34 aa, Artificial Sequence; identical to SEQ ID NO: 1430
  Synthetic Polypeptide
  MOD_RES (1)..(1): N-terminal amino group replaced with hydroxy group
  MISC_FEATURE (11)..(15): Lactam bridge connecting residues 11 and 15
  MOD_RES (34)..(34): C-termincal alpha carboxylate replaced with amide

SEQ ID NO: 1475 - protein, 24 aa, Artificial Sequence
  Synthetic Polypeptide
  MOD_RES (1)..(1): N-terminal amino group replaced with hydroxy group
  MISC_FEATURE (7)..(11): Lactam bridge connecting residues 7 and 11
  MOD_RES (24)..(24): C-terminal alpha carboxylate replaced with amide
FTSDYSKYLDERRAQDFVQWLMDT

SEQ ID NO: 1476 - protein, 24 aa, Artificial Sequence
  Synthetic Polypeptide
  MOD_RES (1)..(1): N-terminal amino group replaced with hydroxy group
  MISC_FEATURE (11)..(15): Lactam bridge connecting residues 11 and 15
  MOD_RES (24)..(24): C-terminal alpha carboxylate replaced with amide
FTSDYSKYLDERRAKDFVQWLMDT

SEQ ID NO: 1477 - protein, 24 aa, Artificial Sequence
  Synthetic Polypeptide
  MOD_RES (1)..(1): N-terminal amino group replaced with hydroxy group
  MISC_FEATURE (15)..(19): Lactam bridge connecting residues 15 and 19
  MOD_RES (24)..(24): C-terminal alpha carboxylate replaced with amide
FTSDYSKYLDERRAKDFVEWLMDT

SEQ ID NO: 1478 - protein, 24 aa, Artificial Sequence
  Synthetic Polypeptide
  MOD_RES (1)..(1): N-terminal amino group replaced with hydroxy group
  MISC_FEATURE (19)..(23): Lactam bridge connecting residues 19 and 23
  MOD_RES (24)..(24): C-terminal alpha carboxylate replaced with amide
FTSDYSKYLDERRAQDFVEWLMKT

SEQ ID NO: 1479 - protein, 24 aa, Artificial Sequence
  Synthetic Polypeptide
  MOD_RES (1)..(1): N-terminal amino group replaced with hydroxy group
  MISC_FEATURE (7)..(11): Lactam bridge connecting residues 7 and 11
  MOD_RES (24)..(24): C-terminal alpha carboxylate replaced with amide
FTSDYSKYLDEQAAKDFIAWLMDT

SEQ ID NO: 1480 - protein, 24 aa, Artificial Sequence
  Synthetic Polypeptide
  MOD_RES (1)..(1): N-terminal amino group replaced with hydroxy group
  MISC_FEATURE (11)..(15): Lactam bridge connecting residues 11 and 15
  MOD_RES (24)..(24): C-terminal alpha carboxylate replaced with amide
FTSDYSKYLDEQAAKEFIAWLMDT

SEQ ID NO: 1481 - protein, 28 aa, Artificial Sequence
  Synthetic Polypeptide
  MISC_FEATURE (15)..(19): Lactam bridge connecting residues 15 and 19
  MOD_RES (28)..(28): C-terminal alpha carboxylate replaced with amide
AEGTFTSEYSKYLDERRAKDFVQWLMDT

SEQ ID NO: 1482 - protein, 28 aa, Artificial Sequence
  Synthetic Polypeptide
  MISC_FEATURE (15)..(19): Lactam bridge connecting residues 15 and 19
  MOD_RES (28)..(28): C-terminal alpha carboxylate replaced with amide
AEGTFTSEYSKYLDEQAAKEFIAWLMDT

SEQ ID NO: 1483 - protein, 29 aa, Artificial Sequence
  Synthetic Polypeptide
  MISC_FEATURE (16)..(20): Lactam bridge connection residues 16 and 20
  MOD_RES (29)..(29): C-terminal alpha carboxylate replaced with amide
HAEGTFTSEYSKYLDERRAKDFVQWLMDT

SEQ ID NO: 1484 - protein, 29 aa, Artificial Sequence
  Synthetic Polypeptide
  MISC_FEATURE (16)..(20): Lactam bridge connecting bridges 16 and 20
  MOD_RES (29)..(29): C-terminal alpha carboxylate replaced with amide
HAEGTFTSEYSKYLDEQAAKEFIAWLMDT

SEQ ID NO: 1485 - protein, 26 aa, Artificial Sequence
  Synthetic Polypeptide
  MISC_FEATURE (13)..(17): Lactam bridge connecting residues 13 and 17
  MOD_RES (26)..(26): C-terminal alpha carboxylate replaced with amide
GTFTSEYSKYLDERRAKDFVQWLMDT

SEQ ID NO: 1486 - protein, 28 aa, Artificial Sequence
  Synthetic Polypeptide
  MISC_FEATURE (5)..(6): Threonine in position 5 and phenyl lactic acid in position 6 linked via ester bond
  MISC_FEATURE (15)..(19): Lactam bridge connecting residues 15 and 19
  MOD_RES (28)..(28): C-terminal alpha carboxylate replaced with amide
SQGTFTSEYSKYLDERRAKDFVQWLMDT

SEQ ID NO: 1487 - protein, 29 aa, Artificial Sequence
  Synthetic Polypeptide
  MISC_FEATURE (5)..(6): Threonine at position 5 and phenyl lactic acid at position 6 linked via ester bond
  MISC_FEATURE (6)..(6): Xaa is phenyl lactic acid
  MISC_FEATURE (16)..(20): Lactam bridge connecting residues 16 and 20
  MOD_RES (29)..(29): C-terminal alpha carboxylate replaced with amide
HAEGTXTSDYSKYLDERRAKDFVQWLMDT

SEQ ID NO: 1488 - protein, 24 aa, Artificial Sequence
  Synthetic Polypeptide
  MOD_RES (1)..(1): N-terminal amino group replaced with hydroxy group
  MISC_FEATURE (7)..(11): Lactam bridge connecting residues 7 and 11
  MOD_RES (19)..(19): Pegylated
  MOD_RES (24)..(24): C-terminal alpha carboxylate replaced with amide
FTSDYSKYLDERRAQDFVCWLMDT

SEQ ID NO: 1489 - protein, 35 aa, Artificial Sequence
  Synthetic Polypeptide
  MOD_RES (1)..(1): N-terminal amino group replaced with hydroxy group
  MISC_FEATURE (7)..(11): Lactam bridge connecting residues 7 and 11
  MOD_RES (35)..(35): Pegylated
  MOD_RES (35)..(35): C-terminal alpha carboxylate replaced with amide
FTSDYSKYLDERRAQDFVQWLMDTGPSSGAPPPSC

SEQ ID NO: 1490 - protein, 24 aa, Artificial Sequence
  Synthetic Polypeptide
  MOD_RES (1)..(1): N-terminal amino group replaced with hydroxy group
  MISC_FEATURE (11)..(15): Lactam bridge connecting residues 11 and 15
  MOD_RES (19)..(19): Pegylated
  MOD_RES (24)..(24): C-terminal alpha carboxylate replaced with amide
FTSDYSKYLDERRAKDFVCWLMDT

SEQ ID NO: 1491 - protein, 35 aa, Artificial Sequence
  Synthetic Polypeptide
  MOD_RES (1)..(1): N-terminal amino group replaced with hydroxy group
  MISC_FEATURE (11)..(15): Lactam bridge connecting residues 11 and 15
  MOD_RES (35)..(35): Pegylated
  MOD_RES (35)..(35): C-terminal alpha carboxylate replaced with amide
FTSDYSKYLDERRAKDFVQWLMDTGPSSGAPPPSC

SEQ ID NO: 1492 - protein, 24 aa, Artificial Sequence
  Synthetic Polypeptide
  MOD_RES (1)..(1): N-terminal amino group replaced with hydroxy group
  MOD_RES (1)..(1): Covalently attached to a C16 fatty acid
  MISC_FEATURE (11)..(15): Lactam bridge connection residues 11 and 15
  MOD_RES (24)..(24): C-terminal alpha carboxylate replaced with amide
FTSDYSKYLDERRAKDFVQWLMDT

SEQ ID NO: 1493 - protein, 24 aa, Artificial Sequence
  Synthetic Polypeptide
  MOD_RES (1)..(1): N-terminal amino group replaced with hydroxy group
  MOD_RES (5)..(5): Linked to a C16 fatty acid via Glu residue
  MISC_FEATURE (11)..(15): Lactam bridge connecting residues 11 and 15
  MISC_FEATURE (15)..(15): Linked to a C16 fatty acid via Glu residue
  MOD_RES (24)..(24): C-terminal alpha carboxylate replaced with amide
FTSDKSKYLDERRAKDFVQWLMDT

SEQ ID NO: 1494 - protein, 24 aa, Artificial Sequence
  Synthetic Polypeptide
  MOD_RES (1)..(1): N-terminal amino group replaced with hydroxy group
  MISC_FEATURE (15)..(15): Linked to C16 fatty acid via Glu residue
  MOD_RES (24)..(24): C-terminal alpha carboxylate replaced with amide
FTSDYSKYLDERRAKDFVQWLMDT

SEQ ID NO: 1495 - protein, 24 aa, Artificial Sequence
  Synthetic Polypeptide
  MOD_RES (1)..(1): N-terminal amino group replaced with hydroxy group
  MISC_FEATURE (11)..(15): Lactam bridge connecting residues 11 and 15
  MISC_FEATURE (19)..(19): Linked to a C16 fatty acid via Glu residue
  MOD_RES (24)..(24): C-terminal alpha carboxylate replaced with amide
FTSDYSKYLDERRAKDFVKWLMDT

SEQ ID NO: 1496 - protein, 24 aa, Artificial Sequence
  Synthetic Polypeptide
  MOD_RES (1)..(1): N-terminal amino group replaced with hydroxy group
  MISC_FEATURE (11)..(15): Lactam bridge connecting residues 11 and 15
  MISC_FEATURE (24)..(24): Linked to a C16 fatty acid via Glu residue
  MOD_RES (24)..(24): C-terminal alpha carboxylate replaced with amide
FTSDYSKYLDERRAKDFVQWLMDK

SEQ ID NO: 1497 - protein, 24 aa, Artificial Sequence
  Synthetic Polypeptide
  MOD_RES (1)..(1): N-terminal amino group replaced with hydroxy group
  MISC_FEATURE (11)..(11): Xaa is amino isobutyric acid
  MOD_RES (24)..(24): C-terminal alpha carboxylate replaced with amide
FTSDYSKYLDXRRAQDFVQWLMNT

SEQ ID NO: 1498 - protein, 24 aa, Artificial Sequence
  Synthetic Polypeptide
  MOD_RES (1)..(1): N-terminal amino group replaced with hydroxy group
  MISC_FEATURE (11)..(11)
  MISC_FEATURE (15)..(15): Xaa is alpha isobutyric acid
  MOD_RES (24)..(24): C-terminal alpha carboxylate replaced with amide
FTSDKSKYLDXRRAXDFVCWLMNT

SEQ ID NO: 1499 - protein, 24 aa, Artificial Sequence
  Synthetic Polypeptide
  MOD_RES (1)..(1): N-terminal amino group replaced with hydroxy group
  MOD_RES (24)..(24): C-terminal alpha carboxylate replaced with amide
FTSDYSKYLDERRAQDFVQWLMNT

SEQ ID NO: 1500 - protein, 24 aa, Artificial Sequence
  Synthetic Polypeptide
  MOD_RES (1)..(1): N-terminal amino group replaced with hydroxy group
  MOD_RES (24)..(24): C-terminal alpha carboxylate replaced with amide
FTSDKSKYLDERRAQDFVCWLMNT

SEQ ID NO: 1501 - protein, 24 aa, Artificial Sequence
  Synthetic Polypeptide
  MISC_FEATURE (4)..(7): Lactam bridge connecting residues 4 and 7
  MOD_RES (11)..(11): Xaa is alpha isobutyric acid
  MOD_RES (24)..(24): C-terminal carboxylate replaced with amide
FTSEYSKYLDXRRAQDFVQWLMNT

SEQ ID NO: 1502 - protein, 24 aa, Artificial Sequence
  Synthetic Polypeptide
  MISC_FEATURE (4)..(7): Lactam bridge connecting residues 4 and 7
  MOD_RES (11)..(11): Xaa is alpha isobutyric acid
  MOD_RES (24)..(24): C-terminal carboxylate replaced with amide
FTSEYSKYLDXRRAQDFVQWLMNT

SEQ ID NO: 1503 - protein, 24 aa, Artificial Sequence
  Synthetic Polypeptide
  MOD_RES (1)..(1): N-terminal amino group replaced with hydroxy group
  MISC_FEATURE (11)..(15): Lactam bridge connecting residues 11 and 15
  MOD_RES (24)..(24): C-terminal alpha carboxylate replaced with amide
FTSDYSKYLDERRAKEFVQWLMDT

SEQ ID NO: 1504 - protein, 24 aa, Artificial Sequence
  Synthetic Polypeptide
  MOD_RES (1)..(1): N-terminal amino group replaced with hydroxy group
  MOD_RES (24)..(24): C-terminal alpha carboxylate replaced with amide
FTSDYSKYLDEQAAKEFIAWLMNT

SEQ ID NO: 1505 - protein, 34 aa, Artificial Sequence; identical to SEQ ID NO: 1430
  Synthetic Polypeptide
  MOD_RES (34)..(34): C-terminal alpha carboxylate replaced with amide

SEQ ID NO: 1506 - protein, 24 aa, Artificial Sequence
  Synthetic Polypeptide
  MOD_RES (1)..(1): N-terminal amino group replaced with hydroxy group
  MISC_FEATURE (5)..(5): Linked to a C16 fatty acid via Glu residue
  MISC_FEATURE (7)..(7): Linked to a C16 fatty acid via Glu residue
  MOD_RES (24)..(24): C-terminal carboxylate replaced with amide
FTSDKSKYLDERRAKDFVQWLMDT

SEQ ID NO: 1507 - protein, 6 aa, Artificial Sequence
  Synthetic Polypeptide
  MISC_FEATURE (1)..(1): Xaa1 is selected from a group consisting of His, D-histidine, alpha, alpha-dimethyl imidiazole acetic acid (DMIA), N-methyl histidine, alpha-methyl histidine, imidazole acetic acid, desaminohistidine, hydroxyl-histidine, acetyl-histidine and
  MISC_FEATURE (2)..(2): Xaa is selected from a group consisting of Ser, D-serine, D-alanine, valine, glycine, N-methyl serine, and aminoisobutyric acid (AIB)
  MISC_FEATURE (3)..(3): Xaa is selected from a group consisting of Glu or Gln
XXXTGF

SEQ ID NO: 1508 - protein, 5 aa, Artificial Sequence
  Synthetic Polypeptide
  MISC_FEATURE (1)..(1): Xaa is selected from a group consisting of Ser, D-serine, D-alanine, valine, glycine, N-methyl serine, and aminoisobutyric acid (AIB)
  MISC_FEATURE (2)..(2): Xaa is selected from a group consisting of Glu or Gln
XXTGF

SEQ ID NO: 1509 - protein, 4 aa, Artificial Sequence
  Synthetic Polypeptide
  MISC_FEATURE (1)..(1): Xaa is selected from a group consisting of Glu or Gln
XTGF

SEQ ID NO: 1510 - protein, 24 aa, Artificial Sequence
  Synthetic Polypeptide
  MOD_RES (1)..(1): N-terminal amino group replaced with hydroxy group
  MOD_RES (24)..(24): C-terminal alpha carboxylate replaced with amide
FTSDYSKYLDSRRAQDFVQWLMDT

SEQ ID NO: 1511 - protein, 28 aa, Artificial Sequence
  Synthetic Polypeptide
  MOD_RES (28)..(28): C-terminal alpha carboxylate replaced with amide
SQGTFTSEYSKYLDSRRAQDFVQWLMNT

SEQ ID NO: 1512 - protein, 28 aa, Artificial Sequence
  Synthetic Polypeptide
  MISC_FEATURE (4)..(5): Threonine at position 4 and phenyl lactic acid at position 5 linked via ester bond
  MISC_FEATURE (5)..(5): Xaa is phenyl lactic acid
  MOD_RES (28)..(28): C-terminal alpha carboxylate replaced with amide
SQGTXTSEYSKYLDSRRAQDFVQWLMNT

SEQ ID NO: 1513 - protein, 29 aa, Artificial Sequence
  Synthetic Polypeptide
  MISC_FEATURE (5)..(6): Threorine at position 5 and phenyl lactic acid at position 6 linked via ester bond
  MISC_FEATURE (6)..(6): Xaa is phenyl lactic acid
  MOD_RES (29)..(29): C-terminal alpha carboxylate replaced with amide
HSQGTXTSEYSKYLDSRRAQDFVQWLMNT

SEQ ID NO: 1514 - protein, 24 aa, Artificial Sequence
  Synthetic Polypeptide
  MOD_RES (1)..(1): N-terminal amino group replaced with hydroxy group
  MISC_FEATURE (11)..(15): Lactam bridge connecting residues 11 and 15
  MOD_RES (19)..(19): Pegylated
  MOD_RES (24)..(24): C-terminal alpha carboxylate replaced with amide
FTSEYSKYLDERRAKDFVCWLMNT

SEQ ID NO: 1515 - protein, 24 aa, Artificial Sequence
  Synthetic Polypeptide
  MOD_RES (1)..(1): N-terminal amino group replaced with hydroxy group
  MISC_FEATURE (11)..(15): Lactam bridge connecting residues 11 and 15
  MISC_FEATURE (19)..(19): Pegylated via spacer
  MOD_RES (24)..(24): C-terminal alpha carboxylate replaced with amide
FTSDYSKYLDERRAKDFVKWLMDT

SEQ ID NO: 1516 - protein, 24 aa, Artificial Sequence
  Synthetic Polypeptide
  MOD_RES (1)..(1): N-terminal amino group replaced with hydroxy group
  MISC_FEATURE (11)..(15): Lactam bridge connecting residues 11 and 15
  MOD_RES (19)..(19): Pegylated via rigid spacer
  MOD_RES (24)..(24): C-terminal alpha carboxylate replaced with amide
FTSDYSKYLDERRAKDFVKWLMDT

SEQ ID NO: 1517 - protein, 35 aa, Artificial Sequence
  Synthetic Polypeptide
  MISC_FEATURE (1)..(1): N-terminal amino group replaced with hydroxy group
  MISC_FEATURE (11)..(15): Lactam bridge connecting residues 11 and 15
  MOD_RES (35)..(35): Pegylated
  MOD_RES (35)..(35): C-terminal alpha carboxylate replaced with amide
FTSDYSKYLDERRAKDFVQWLMDTGPGPGPGPGPC

SEQ ID NO: 1518 - protein, 35 aa, Artificial Sequence
  Synthetic Polypeptide
  MOD_RES (1)..(1): N-terminal amino group replaced with hydroxy group
  MISC_FEATURE (11)..(15): Lactam bridge connecting residues 11 and 15
  MOD_RES (35)..(35): Pegylated
  MOD_RES (35)..(35): C-terminal alpha carboxylate reaplaced with amide
FTSDYSKYLDERRAKDFVQWLMDGGPSSGAPPPSC

SEQ ID NO: 1519-1700 - skipped (182 entries)

SEQ ID NO: 1701 - protein, 29 aa, Artificial Sequence
  Synthetic peptide
  MOD_RES (2)..(2): Xaa is AIB
  misc_feature (16)..(16): Xaa can be any naturally occurring amino acid
  misc_feature (20)..(20): Xaa can be any naturally occurring amino acid
  MOD_RES (29)..(29): C-terminal amidation
HSQGTFTSDYSKYLDXQAAXGFIAWLMNT

SEQ ID NO: 1702 - protein, 29 aa, Artificial Sequence
  Synthetic peptide
  MOD_RES (2)..(2): Xaa is AIB
  MOD_RES (10)..(10): Acylated with C16 fatty acyl group
  MOD_RES (16)..(16): Xaa is AIB
  MOD_RES (29)..(29): C-terminal amidation
HXQGTFTSDKSKYLDXRAAQDFVQWLMDT

SEQ ID NO: 1703 - protein, 29 aa, Artificial Sequence
  Synthetic peptide
  MOD_RES (2)..(2): Xaa is AIB
  MOD_RES (10)..(10): Acylated with C14 fatty acyl group via dipeptide spacer
  MOD_RES (16)..(16): Xaa is AIB
  MOD_RES (29)..(29): C-terminal amidation
HXQGTFTSDKSKYLDXRAAQDFVQWLMDT

SEQ ID NO: 1704 - protein, 29 aa, Artificial Sequence
  Synthetic peptide
  MOD_RES (2)..(2): Xaa is AIB
  MOD_RES (10)..(10): Acylated with C18 fatty acyl group via dipeptide spacer
  MOD_RES (16)..(16): Xaa is AIB
  MOD_RES (29)..(29): C-terminal amidation
HXQGTFTSDKSKYLDXRAAQDFVQWLMDT

SEQ ID NO: 1705 - protein, 29 aa, Artificial Sequence
  Synthetic peptide
  MOD_RES (1)..(10): Acylated with C16 fatty acyl group via dipeptide spacer
  MOD_RES (2)..(2): Xaa is AIB
  MOD_RES (16)..(16): Xaa is AIB
  MOD_RES (29)..(29): C-terminal amidation
HXEGTFTSDKSKYLDXRAAQDFVQWLMDT

SEQ ID NO: 1706 - protein, 29 aa, Artificial Sequence
  Synthetic peptide
  MOD_RES (2)..(2): Xaa is AIB
  MOD_RES (10)..(10): Acylated with C16 fatty acyl group via dipeptide spacer
  MOD_RES (16)..(16): Xaa is AIB
HXQGTFISDKSKYLDXRAAQDFVQWLMDT

SEQ ID NO: 1707 - protein, 29 aa, Artificial Sequence
  Synthetic peptide
  MOD_RES (2)..(2): Xaa is AIB
  MOD_RES (10)..(10): Acylated with C16 fatty acyl group via dipeptide spacer
  MOD_RES (29)..(29): C-terminal amidation
HXQGTFTSDKSKYLDERAAQDFVQWLMDT

SEQ ID NO: 1708 - protein, 29 aa, Artificial Sequence
  Synthetic peptide
  MOD_RES (2)..(2): Xaa is AIB
  MOD_RES (10)..(10): Acylated with C16 fatty acyl group via dipeptide spacer
  MOD_RES (16)..(16): Xaa is AIB
  MOD_RES (29)..(29): C-terminal amidation
HXQGTFTSDKSKYLEXRAAQDFVQWLMDT

SEQ ID NO: 1709 - protein, 29 aa, Artificial Sequence
  Synthetic peptide
  MOD_RES (2)..(2): d-Ser
  MOD_RES (10)..(10): Acylated with C16 fatty acyl group via dipeptide spacer
  MOD_RES (16)..(16): Xaa is AIB
  MOD_RES (29)..(29): C-terminal amidation
HSQGTFTSDKSKYLDXRAAQDFVQWLMDT

SEQ ID NO: 1710 - protein, 29 aa, Artificial Sequence
  Synthetic peptide
  MOD_RES (2)..(2): Xaa is AIB
  MOD_RES (10)..(10): Acylated with C16 fatty acyl group via dipeptide spacer
  MOD_RES (16)..(16): Xaa is AIB
  MOD_RES (29)..(29): C-terminal amidation
HXQGTFTSDKSKYLDXRAAQDFVQWLLDT

SEQ ID NO: 1711 - protein, 29 aa, Artificial Sequence
  Synthetic peptide
  MOD_RES (2)..(2): Xaa is AIB
  MOD_RES (10)..(10): Acylated with C16 fatty acyl group via dipeptide spacer
  MOD_RES (29)..(29): C-terminal amidation
HXQGTFTSDKSKYLDEQAAKEFIAWLLDT

SEQ ID NO: 1712 - protein, 29 aa, Artificial Sequence
  Synthetic peptide
  MOD_RES (2)..(2): Xaa is AIB
  MOD_RES (10)..(10): Acylated with C16 fatty acyl group via gamma-Glu spacer
  MOD_RES (29)..(29): C-terminal amidation
HXQGTFTSDKSKYLDEQAAKEFICWLLDT

SEQ ID NO: 1713 - protein, 29 aa, Artificial Sequence
  Synthetic peptide
  MOD_RES (2)..(2): Xaa is AIB
  MOD_RES (10)..(10): Acylated with C16 fatty acyl group via gamma-Glu spacer
  MOD_RES (24)..(24): PEGYLATION
  MOD_RES (29)..(29): C-terminal amidation
HXQGTFTSDKSKYLDEQAAKEFICWLLDT

SEQ ID NO: 1714 - protein, 29 aa, Artificial Sequence
  Synthetic peptide
  MOD_RES (2)..(2): Xaa is AIB
  MOD_RES (10)..(10): Acylated with C16 fatty acyl group via gamma-Glu spacer
  MOD_RES (24)..(24): PEGYLATION
  MOD_RES (29)..(29): C-terminal amidation
HXQGTFTSDKSKYLDERAAQDFVCWLLDT

SEQ ID NO: 1715 - protein, 30 aa, Artificial Sequence
  Synthetic peptide
  MOD_RES (2)..(2): Xaa is AIB
  MOD_RES (10)..(10): Acylated with C16 fatty acyl group via gamma-Glu spacer
  MOD_RES (30)..(30): PEGYLATION
  MOD_RES (30)..(30): C-terminal amidation
HXQGTFTSDKSKYLDEQAAKEFIQWLLDTC

SEQ ID NO: 1716 - protein, 29 aa, Artificial Sequence
  Synthetic peptide
  MOD_RES (10)..(10): Acylated with C16 fatty acyl group via gamma-Glu spacer
  MOD_RES (24)..(24): PEGYLATION
  MOD_RES (29)..(29): C-terminal amidation
HAQGTFTSDKSKYLDERAAQDFVCWLLDT

SEQ ID NO: 1717 - protein, 29 aa, Artificial Sequence
  Synthetic peptide
  MOD_RES (2)..(2): d-Ser
  MOD_RES (10)..(10): Acylated with C16 fatty acyl group via gamma-Glu spacer
  MOD_RES (29)..(29): C-terminal amidation
HSQGTFTSDKSKYLDEQAAKEFICWLLDT

SEQ ID NO: 1718 - protein, 29 aa, Artificial Sequence
  Synthetic peptide
  MOD_RES (2)..(2): d-Ser
  MOD_RES (10)..(10): Acylated with C16 fatty acyl group via gamma-Glu spacer
  MOD_RES (29)..(29): C-terminal amidation
HSQGTFTSDKSKYLDERAAQDFVQWLLDT

SEQ ID NO: 1719 - protein, 29 aa, Artificial Sequence
  Synthetic peptide
  MOD_RES (2)..(2): d-Ser
  MOD_RES (10)..(10): Acylated with C16 fatty acyl group via gamma-Glu spacer
  MOD_RES (29)..(29): C-terminal amidation
HSQGTFTSDKSKYLDERAAQDFVCWLLDT

SEQ ID NO: 1720 - protein, 29 aa, Artificial Sequence
  Synthetic peptide
  MOD_RES (2)..(2): d-Ser
  MOD_RES (10)..(10): Acylated with C16 fatty acyl group via gamma-Glu spacer
HSQGTFTSDKSKYLDEQAAKEFICWLLDT

SEQ ID NO: 1721 - protein, 31 aa, Artificial Sequence
  Synthetic peptide
  MOD_RES (2)..(2): d-Ser
  MOD_RES (10)..(10): Acylated with C16 fatty acyl group via gamma-Glu spacer
  MOD_RES (31)..(31): C-terminal amidation
HSQGTFTSDKSKYLDEQAAKEFICWLLDTGE

SEQ ID NO: 1722 - protein, 31 aa, Artificial Sequence
  Synthetic peptide
  MOD_RES (2)..(2): d-Ser
  MOD_RES (10)..(10): Acylated with C16 fatty acyl group via gamma-Glu spacer
  MOD_RES (24)..(24): PEGYLATION
HSQGTFTSDKSKYLDEQAAKEFICWLLDTGG

SEQ ID NO: 1723 - protein, 29 aa, Artificial Sequence
  Synthetic peptide
  MOD_RES (2)..(2): d-Ser
  MOD_RES (10)..(10): Acylated with C16 fatty acyl group via gamma-Glu spacer
  MOD_RES (24)..(24): PEGYLATION
  MOD_RES (29)..(29): C-terminal amidation
HSQGTFTSDKSKYLDERAAQDFVCWLLDT

SEQ ID NO: 1724 - protein, 30 aa, Artificial Sequence
  Synthetic peptide
  MOD_RES (2)..(2): d-Ser
  MOD_RES (10)..(10): Acylated with C16 fatty acyl group via gamma-Glu spacer
  MOD_RES (30)..(30): PEGYLATION
  MOD_RES (30)..(30): C-terminal amidation
HSQGTFTSDKSKYLDERAAQDFVQWLLDTC

SEQ ID NO: 1725 - protein, 30 aa, Artificial Sequence
  Synthetic peptide
  MOD_RES (2)..(2): d-Ser
  MOD_RES (10)..(10): Acylated with C16 fatty acyl group via gamma-Glu spacer
  MOD_RES (24)..(24): PEGYLATION
  MOD_RES (30)..(30): C-terminal amidation
HSQGTFTSDYSKYLDSRRAQDFVQWLMNTE

SEQ ID NO: 1726 - protein, 30 aa, Artificial Sequence
  Synthetic peptide
  MOD_RES (2)..(2): d-Ser
  MOD_RES (10)..(10): Acylated with C16 fatty acyl group via gamma-Glu spacer
  MOD_RES (24)..(24): PEGYLATION
HSQGTFTSDKSKYLDEQAAKEFICWLLDTC

SEQ ID NO: 1727 - protein, 29 aa, Artificial Sequence
  Synthetic peptide
  MOD_RES (1)..(1): Xaa is DMIA
  MOD_RES (10)..(10): Acylated with C16 fatty acyl group via gamma-Glu spacer
  MOD_RES (29)..(29): C-terminal amidation
XSQGTFTSDKSKYLDEQAAKEFICWLLDT

SEQ ID NO: 1728 - protein, 29 aa, Artificial Sequence
  Synthetic peptide
  MOD_RES (1)..(1): des-amino-His
  MOD_RES (10)..(10): Acylated with C16 fatty acyl group via gamma-Glu spacer
  MOD_RES (29)..(29): C-terminal amidation
HSQGTFTSDKSKYLDEQAAKEFICWLLDT

SEQ ID NO: 1729 - protein, 29 aa, Artificial Sequence
  Synthetic peptide
  MOD_RES (1)..(1): Ac-His
  MOD_RES (10)..(10): Acylated with C16 fatty acyl group via gamma-Glu spacer
  MOD_RES (24)..(24): PEGYLATION
  MOD_RES (29)..(29): C-terminal amidation
HSQGTFTSDKSKYLDEQAAKEFICWLLDT

SEQ ID NO: 1730 - protein, 29 aa, Artificial Sequence
  Synthetic peptide
  MOD_RES (2)..(2): Xaa is AIB
  MOD_RES (10)..(10): Acylated with C16 fatty acyl group via gamma-Glu spacer
  MOD_RES (29)..(29): C-terminal amidation
HXQGTFTSDKSKYLDEEAVRLFIEWLMNT

SEQ ID NO: 1731 - protein, 29 aa, Artificial Sequence
  Synthetic peptide
  MOD_RES (2)..(2): Xaa is AIB
  MOD_RES (10)..(10): Acylated with C16 fatty acyl group
  MOD_RES (29)..(29): C-terminal amidation
HXQGTFTSDKSKYLDEEAVRLFIEWLMNT

SEQ ID NO: 1732 - protein, 29 aa, Artificial Sequence
  Synthetic peptide
  MOD_RES (2)..(2): Xaa is AIB
  MOD_RES (24)..(24): PEGYLATION
  MOD_RES (29)..(29): C-terminal amidation
HXQGTFTSDYSKYLDEEAVRLFICWLMNT

SEQ ID NO: 1733 - protein, 29 aa, Artificial Sequence
  Synthetic peptide
  MOD_RES (2)..(2): Xaa is AIB
  MOD_RES (29)..(29): C-terminal amidation
HXQGTFTSDYSKYLDEEAVRLFIEWLMNT

SEQ ID NO: 1734 - protein, 29 aa, Artificial Sequence
  Synthetic peptide
  MOD_RES (2)..(2): Xaa is AIB
  MOD_RES (29)..(29): C-terminal amidation
HXQGTFTSDYSKYLDEEAVRLFICWLMNT

SEQ ID NO: 1735 - protein, 29 aa, Artificial Sequence
  Synthetic peptide
  MOD_RES (2)..(2): d-Ser
  MOD_RES (24)..(24): PEGYLATION
  MOD_RES (29)..(29): C-terminal amidation
HSQGTFTSDYSKYLDEEAVRLFICWLMNT

SEQ ID NO: 1736 - protein, 29 aa, Artificial Sequence
  Synthetic peptide
  MOD_RES (2)..(2): d-Ser
  MOD_RES (29)..(29): C-terminal amidation
HSQGTFTSDYSKYLDEEAVRLFIEWLMNT

SEQ ID NO: 1737 - protein, 29 aa, Artificial Sequence
  Synthetic peptide
  MOD_RES (2)..(2): d-Ser
  MOD_RES (29)..(29): C-terminal amidation
HSQGTFTSDYSKYLDEEAVRLFICWLMNT

SEQ ID NO: 1738 - protein, 29 aa, Artificial Sequence
  Synthetic peptide
  MOD_RES (10)..(10): Acylated with C16 fatty acyl group via acidic amino acid spacer
  MOD_RES (29)..(29): C-terminal amidation
HSQGTFTSDKSKYLDEEAVRLFIEWLMNT

SEQ ID NO: 1739 - protein, 29 aa, Artificial Sequence
  Synthetic peptide
  MOD_RES (10)..(10): Acylated with C16 fatty acyl group via gamma-Glu spacer
  MOD_RES (29)..(29): C-terminal amidation
HSQGTFTSDKSKYLDEEAVRLFIEWLMNT

SEQ ID NO: 1740 - protein, 29 aa, Artificial Sequence
  Synthetic peptide
  MOD_RES (2)..(2): Xaa is AIB
  MISC_FEATURE (16)..(20): Salt bridge
  MISC_FEATURE (17)..(21): Salt bridge
  MOD_RES (24)..(24): PEGYLATION
  MOD_RES (29)..(29): C-terminal amidation
HXQGTFTSDYSKYLDEKRAKEFVCWLMNT

SEQ ID NO: 1741 - protein, 29 aa, Artificial Sequence
  Synthetic peptide
  MOD_RES (2)..(2): Xaa is AIB
  MOD_RES (16)..(16): Xaa is AIB
  MISC_FEATURE (16)..(20): Salt bridge
  MISC_FEATURE (17)..(21): Salt bridge
  MOD_RES (24)..(24): PEGYLATION
  MOD_RES (29)..(29): C-terminal amidation
HXQGTFTSDYSKYLDXKRAKEFVCWLMNT

SEQ ID NO: 1742 - protein, 29 aa, Artificial Sequence
  Synthetic peptide
  MOD_RES (2)..(2): d-Ser
  MISC_FEATURE (16)..(20): Salt bridge
  MISC_FEATURE (17)..(21): Salt bridge
  MOD_RES (24)..(24): PEGYLATION
  MOD_RES (29)..(29): C-terminal amidation
HSQGTFTSDYSKYLDEKRAKEFVCWLMNT

SEQ ID NO: 1743 - protein, 29 aa, Artificial Sequence
  Synthetic peptide
  MOD_RES (2)..(2): d-Ser
  MOD_RES (16)..(16): Xaa is AIB
  MISC_FEATURE (16)..(20): Salt bridge
  MISC_FEATURE (17)..(21): Salt bridge
  MOD_RES (24)..(24): PEGYLATION
  MOD_RES (29)..(29): C-terminal amidation
HSQGTFTSDYSKYLDXKRAKEFVCWLMNT

SEQ ID NO: 1744 - protein, 29 aa, Artificial Sequence
  Synthetic peptide
  MOD_RES (2)..(2): d-Ser
  MISC_FEATURE (16)..(20): Salt bridge
  MISC_FEATURE (17)..(21): Salt bridge
  MOD_RES (29)..(29): C-terminal amidation
HSQGTFTSDYSKYLDEKRAKEFVQWLMNT

SEQ ID NO: 1745 - protein, 29 aa, Artificial Sequence
  Synthetic peptide
  MOD_RES (2)..(2): D-serine, D-alanine, valine, amino n-butyric acid, glycine, N-methyl serine, aminoisobutyric acid
  MOD_RES (16)..(16): Xaa is AIB
  MISC_FEATURE (16)..(20): Salt bridge
  MISC_FEATURE (17)..(21): Salt bridge
  MOD_RES (29)..(29): C-terminal amidation
HSQGTFTSDYSKYLDXKRAKEFVQWLMNT

SEQ ID NO: 1746 - protein, 29 aa, Artificial Sequence
  Synthetic peptide
  MOD_RES (2)..(2): D-serine, D-alanine, valine, amino n-butyric acid, glycine, N-methyl serine, aminoisobutyric acid
  MOD_RES (10)..(10): Acylated with C16 fatty acyl group via gamma-Glu spacer
  MISC_FEATURE (15)..(20): Salt bridge
  MOD_RES (16)..(16): Xaa is AIB
  MISC_FEATURE (16)..(21): Salt bridge
  MOD_RES (29)..(29): C-terminal amidation
HSQGTFTSDKSKYLDXKRAKEFVQWLMNT

SEQ ID NO: 1747 - protein, 29 aa, Artificial Sequence
  Synthetic peptide
  MOD_RES (1)..(1): Xaa is DMIA
  MOD_RES (16)..(16): Xaa is AIB
  MISC_FEATURE (16)..(20): Salt bridge
  MISC_FEATURE (17)..(21): Salt bridge
  MOD_RES (24)..(24): PEGYLATION
  MOD_RES (29)..(29): C-terminal amidation
XSQGTFTSDYSKYLDXKRAKEFVCWLMNT

SEQ ID NO: 1748 - protein, 29 aa, Artificial Sequence
  Synthetic peptide
  MISC_FEATURE (16)..(20): Salt bridge
  MISC_FEATURE (17)..(21): Salt bridge
  MOD_RES (29)..(29): C-terminal amidation
HSQGTFTSDYSKYLDEKRAKEFVQWLMNT

SEQ ID NO: 1749 - protein, 29 aa, Artificial Sequence
  Synthetic peptide
  MOD_RES (2)..(2): D-serine, D-alanine, valine, amino n-butyric acid, glycine, N-methyl serine, aminoisobutyric acid
  MOD_RES (10)..(10): Acylated with C16 fatty acyl group via dipeptide spacer
  MOD_RES (16)..(16): Xaa is AIB
  MOD_RES (29)..(29): C-terminal amidation
HXQGTFTSDKSKYLDXRAAQDFVQWLMDT

SEQ ID NO: 1750 - protein, 29 aa, Artificial Sequence
  Synthetic peptide
  MOD_RES (2)..(2): Xaa is AIB
  MOD_RES (10)..(10): Acylated with C16 fatty acyl group via acidic amino acid spacer
  MOD_RES (29)..(29): C-terminal amidation
HXQGTFTSDKSKYLDEQAAKEFICWLLDT

SEQ ID NO: 1751 - protein, 29 aa, Artificial Sequence
  Synthetic peptide
  MOD_RES (2)..(2): Xaa is AIB
  MOD_RES (10)..(10): Acylated with C16 fatty acyl group via acidic amino acid spacer
  MOD_RES (24)..(24): PEGYLATION
  MOD_RES (29)..(29): C-terminal amidation
HXQGTFTSDKSKYLDEQAAKEFICWLLDT

SEQ ID NO: 1752 - protein, 29 aa, Artificial Sequence
  Synthetic peptide
  MOD_RES (2)..(2): Xaa is AIB
  MOD_RES (10)..(10): Acylated with C16 fatty acyl group via acidic amino acid spacer
  MOD_RES (24)..(24): PEGYLATION
  MOD_RES (29)..(29): C-terminal amidation
HXQGTFTSDKSKYLDERAAQDFVCWLLDT

SEQ ID NO: 1753 - protein, 30 aa, Artificial Sequence; identical to SEQ ID NO: 1715
  Synthetic peptide
  MOD_RES (2)..(2): Xaa is AIB
  MOD_RES (10)..(10): Acylated with C16 fatty acyl group via acidic amino acid spacer
  MOD_RES (30)..(30): PEGYLATION
  MOD_RES (30)..(30): C-terminal amidation

SEQ ID NO: 1754 - protein, 29 aa, Artificial Sequence
  Synthetic peptide
  MOD_RES (10)..(10): Acylated with C16 fatty acyl group via acidic amino acid spacer
  MOD_RES (24)..(24): PEGYLATION
  MOD_RES (29)..(29): C-terminal amidation
HAQGTFTSDKSKYLDERAAQDFVCWLLDT

SEQ ID NO: 1755 - protein, 29 aa, Artificial Sequence
  Synthetic peptide
  MOD_RES (2)..(2): D-serine, D-alanine, valine, amino n-butyric acid, glycine, N-methyl serine, aminoisobutyric acid
  MOD_RES (10)..(10): Acylated with C16 fatty acyl group via acidic amino acid spacer
  MOD_RES (29)..(29): C-terminal amidation
HXQGTFTSDKSKYLDEQAAKEFICWLLDT

SEQ ID NO: 1756 - protein, 29 aa, Artificial Sequence
  Synthetic peptide
  MOD_RES (2)..(2): D-serine, D-alanine, valine, amino n-butyric acid, glycine, N-methyl serine, aminoisobutyric acid
  MOD_RES (10)..(10): Acylated with C16 fatty acyl group via acidic amino acid spacer
  MOD_RES (29)..(29): C-terminal amidation
HXQGTFTSDKSKYLDERAAQDFVQWLLDT

SEQ ID NO: 1757 - protein, 29 aa, Artificial Sequence
  Synthetic peptide
  MOD_RES (2)..(2): D-serine, D-alanine, valine, amino n-butyric acid, glycine, N-methyl serine, aminoisobutyric acid
  MOD_RES (10)..(10): Acylated with C16 fatty acyl group via acidic amino acid spacer
  MOD_RES (29)..(29): C-terminal amidation
HXQGTFTSDKSKYLDERAAQDFVCWLLDT

SEQ ID NO: 1758 - protein, 29 aa, Artificial Sequence
  Synthetic peptide
  MOD_RES (2)..(2): D-serine, D-alanine, valine, amino n-butyric acid, glycine, N-methyl serine, aminoisobutyric acid
  MOD_RES (10)..(10): Acylated with C16 fatty acyl group via acidic amino acid spacer
HXQGTFTSDKSKYLDEQAAKEFICWLLDT

SEQ ID NO: 1759 - protein, 31 aa, Artificial Sequence
  Synthetic peptide
  MOD_RES (2)..(2): D-serine, D-alanine, valine, amino n-butyric acid, glycine, N-methyl serine, aminoisobutyric acid
  MOD_RES (10)..(10): Acylated with C16 fatty acyl group via acidic amino acid spacer
  MOD_RES (31)..(31): C-terminal amidation
HXQGTFTSDKSKYLDEQAAKEFICWLLDTGE

SEQ ID NO: 1760 - protein, 31 aa, Artificial Sequence
  Synthetic peptide
  MOD_RES (2)..(2): D-serine, D-alanine, valine, amino n-butyric acid, glycine, N-methyl serine, aminoisobutyric acid
  MOD_RES (10)..(10): Acylated with C16 fatty acyl group via acidic amino acid spacer
  MOD_RES (24)..(24): PEGYLATION
HXQGTFTSDKSKYLDEQAAKEFICWLLDTGG

SEQ ID NO: 1761 - protein, 29 aa, Artificial Sequence
  Synthetic peptide
  MOD_RES (2)..(2): D-serine, D-alanine, valine, amino n-butyric acid, glycine, N-methyl serine, aminoisobutyric acid
  MOD_RES (10)..(10): Acylated with C16 fatty acyl group via acidic amino acid spacer
  MOD_RES (24)..(24): PEGYLATION
  MOD_RES (29)..(29): C-terminal amidation
HXQGTFTSDKSKYLDERAAQDFVCWLLDT

SEQ ID NO: 1762 - protein, 30 aa, Artificial Sequence
  Synthetic peptide
  MOD_RES (2)..(2): D-serine, D-alanine, valine, amino n-butyric acid, glycine, N-methyl serine, aminoisobutyric acid
  MOD_RES (10)..(10): Acylated with C16 fatty acyl group via acidic amino acid spacer
  MOD_RES (30)..(30): PEGYLATION
  MOD_RES (30)..(30): C-terminal amidation
HXQGTFTSDKSKYLDERAAQDFVQWLLDTC

SEQ ID NO: 1763 - protein, 30 aa, Artificial Sequence
  Synthetic peptide
  MOD_RES (2)..(2): D-serine, D-alanine, valine, amino n-butyric acid, glycine, N-methyl serine, aminoisobutyric acid
  MOD_RES (10)..(10): Acylated with C16 fatty acyl group via acidic amino acid spacer
  MOD_RES (24)..(24): PEGYLATION
  MOD_RES (30)..(30): C-terminal amidation
HXQGTFTSDYSKYLDSRRAQDFVQWLMNTE

SEQ ID NO: 1764 - protein, 30 aa, Artificial Sequence
  Synthetic peptide
  MOD_RES (2)..(2): D-serine, D-alanine, valine, amino n-butyric acid, glycine, N-methyl serine, aminoisobutyric acid
  MOD_RES (10)..(10): Acylated with C16 fatty acyl group via acidic amino acid spacer
  MOD_RES (24)..(24): PEGYLATION
HXQGTFTSDKSKYLDEQAAKEFICWLLDTC

SEQ ID NO: 1765 - protein, 29 aa, Artificial Sequence
  Synthetic peptide
  MOD_RES (1)..(1): Xaa is DMIA
  MOD_RES (10)..(10): Acylated with C16 fatty acyl group via acidic amino acid spacer
  MOD_RES (29)..(29): C-terminal amidation
XSQGTFTSDKSKYLDEQAAKEFICWLLDT

SEQ ID NO: 1766 - protein, 29 aa, Artificial Sequence
  Synthetic peptide
  MOD_RES (1)..(1): des-amino-His
  MOD_RES (10)..(10): Acylated with C16 fatty acyl group via acidic amino acid spacer
  MOD_RES (29)..(29): C-terminal amidation
HSQGTFTSDKSKYLDEQAAKEFICWLLDT

SEQ ID NO: 1767 - protein, 29 aa, Artificial Sequence
  Synthetic peptide
  MOD_RES (1)..(1): Ac-His
  MOD_RES (10)..(10): Acylated with C16 fatty acyl group via acidic amino acid spacer
  MOD_RES (24)..(24): PEGYLATION
  MOD_RES (29)..(29): C-terminal amidation
HSQGTFTSDKSKYLDEQAAKEFICWLLDT

SEQ ID NO: 1768 - protein, 29 aa, Artificial Sequence
  Synthetic peptide
  MOD_RES (2)..(2): Xaa is AIB
  MOD_RES (10)..(10): Acylated with C16 fatty acyl group via acidic amino acid spacer
  MOD_RES (29)..(29): C-terminal amidation
HXQGTFTSDKSKYLDEEAVRLFIEWLMNT

SEQ ID NO: 1769 - protein, 29 aa, Artificial Sequence
  Synthetic peptide
  MOD_RES (2)..(2): D-serine, D-alanine, valine, amino n-butyric acid, glycine, N-methyl serine, aminoisobutyric acid
  MOD_RES (24)..(24): PEGYLATION
  MOD_RES (29)..(29): C-terminal amidation
HXQGTFTSDYSKYLDEEAVRLFICWLMNT

SEQ ID NO: 1770 - protein, 29 aa, Artificial Sequence
  Synthetic peptide
  MOD_RES (2)..(2): D-serine, D-alanine, valine, amino n-butyric acid, glycine, N-methyl serine, aminoisobutyric acid
  MOD_RES (29)..(29): C-terminal amidation
HXQGTFTSDYSKYLDEEAVRLFIEWLMNT

SEQ ID NO: 1771 - protein, 29 aa, Artificial Sequence
  Synthetic peptide
  MOD_RES (2)..(2): D-serine, D-alanine, valine, amino n-butyric acid, glycine, N-methyl serine, aminoisobutyric acid
  MOD_RES (29)..(29): C-terminal amidation
HXQGTFTSDYSKYLDEEAVRLFICWLMNT

SEQ ID NO: 1772 - protein, 29 aa, Artificial Sequence
  Synthetic peptide
  MOD_RES (10)..(10): Acylated with C16 fatty acyl group via acidic amino acid spacer
  MOD_RES (29)..(29): C-terminal amidation
HSQGTFTSDKSKYLDEEAVRLFIEWLMNT

SEQ ID NO: 1773 - protein, 29 aa, Artificial Sequence
  Synthetic peptide
  MOD_RES (2)..(2): D-serine, D-alanine, valine, amino n-butyric acid, glycine, N-methyl serine, aminoisobutyric acid
  MISC_FEATURE (16)..(20): Salt bridge
  MISC_FEATURE (17)..(21): Salt bridge
  MOD_RES (24)..(24): PEGYLATION
  MOD_RES (29)..(29): C-terminal amidation
HXQGTFTSDYSKYLDEKRAKEFVCWLMNT

SEQ ID NO: 1774 - protein, 29 aa, Artificial Sequence
  Synthetic peptide
  MOD_RES (2)..(2): D-serine, D-alanine, valine, amino n-butyric acid, glycine, N-methyl serine, aminoisobutyric acid
  MOD_RES (16)..(16): Xaa is AIB
  MISC_FEATURE (16)..(20): Salt bridge
  MISC_FEATURE (17)..(21): Salt bridge
  MOD_RES (24)..(24): PEGYLATION
  MOD_RES (29)..(29): C-terminal amidation
HSQGTFTSDYSKYLDXKRAKEFVCWLMNT

SEQ ID NO: 1775 - protein, 29 aa, Artificial Sequence
  Synthetic peptide
  MOD_RES (2)..(2): D-serine, D-alanine, valine, amino n-butyric acid, glycine, N-methyl serine, aminoisobutyric acid
  MISC_FEATURE (16)..(20): Salt bridge
  MISC_FEATURE (17)..(21): Salt bridge
  MOD_RES (29)..(29): C-terminal amidation
HSQGTFTSDYSKYLDEKRAKEFVQWLMNT

SEQ ID NO: 1776 - protein, 29 aa, Artificial Sequence
  Synthetic peptide
  MOD_RES (2)..(2): D-serine, D-alanine, valine, amino n-butyric acid, glycine, N-methyl serine, aminoisobutyric acid
  MOD_RES (10)..(10): Acylated with C16 fatty acyl group via acidic amino acid spacer
  MISC_FEATURE (15)..(20): Salt bridge
  MOD_RES (16)..(16): Xaa is AIB
  MISC_FEATURE (16)..(21): Salt bridge
  MOD_RES (29)..(29): C-terminal amidation
HSQGTFTSDKSKYLDXKRAKEFVQWLMNT

SEQ ID NO: 1777-1800 - skipped (24 entries)

SEQ ID NO: 1801 - protein, 37 aa, Homo sapiens
HSQGTFTSDYSKYLDSRRAQDFVQWLMNTKRNRNNIA

SEQ ID NO: 1802 - protein, 37 aa, Artificial Sequence
  OXM analog
HSEGTFTSDYSKYLDSRRAQDFVQWLMNTKRNRNNIA

SEQ ID NO: 1803 - protein, 37 aa, Artificial Sequence
  OXM analog
HSDGTFTSDYSKYLDSRRAQDFVQWLMNTKRNRNNIA

SEQ ID NO: 1804 - protein, 38 aa, Artificial Sequence
  OXM analog
  MOD_RES (2)..(2): Xaa=Aminoisobutyric acid
  MOD_RES (38)..(38): C-terminal amidation
HXQGTFTSDYSKYLDSRRAQDFVQWLMNTKRNRNNIAC

SEQ ID NO: 1805 - protein, 38 aa, Artificial Sequence
  OXM analog
  MOD_RES (2)..(2): Xaa=D-serine
  MOD_RES (38)..(38): Xaa=Cys(mPEG)5kDa
  MOD_RES (38)..(38): C-terminal amidation
HXQGTFTSDYSKYLDSRRAQDFVQWLMNTKRNRNNIAX

SEQ ID NO: 1806 - protein, 38 aa, Artificial Sequence; identical to SEQ ID NO: 1805
  OXM analog
  MOD_RES (2)..(2): Xaa=D-serine
  MOD_RES (38)..(38): Xaa=Cys(mPEG)20kDa
  MOD_RES (38)..(38): C-terminal amidation

SEQ ID NO: 1807 - protein, 38 aa, Artificial Sequence; identical to SEQ ID NO: 1805
  OXM analog
  MOD_RES (2)..(2): Xaa=D-serine
  MOD_RES (38)..(38): Xaa=Cys(mPEG)2 40kDa
  MOD_RES (38)..(38): C-terminal amidation

SEQ ID NO: 1808 - protein, 38 aa, Artificial Sequence; identical to SEQ ID NO: 1805
  OXM analog
  MOD_RES (2)..(2): Xaa=D-serine
  MOD_RES (38)..(38): Xaa=Cys(9cholest-5-en-3-yl{[(2R)-3-amino-2-(amino) -3-oxopropyl]thio}acetate)
  MOD_RES (38)..(38): C-terminal amidation

SEQ ID NO: 1809 - protein, 38 aa, Artificial Sequence; identical to SEQ ID NO: 1805
  OXM analog
  MOD_RES (2)..(2): Xaa=Aminoisobutyric acid
  MOD_RES (38)..(38): Xaa=Cys(mPEG)5kDa
  MOD_RES (38)..(38): C-terminal amidation

SEQ ID NO: 1810 - protein, 38 aa, Artificial Sequence; identical to SEQ ID NO: 1805
  OXM analog
  MOD_RES (2)..(2): Xaa=aminoisobutyric acid
  MOD_RES (38)..(38): Xaa=Cys(mPEG)20kDa
  MOD_RES (38)..(38): C-terminal amidation

SEQ ID NO: 1811 - protein, 38 aa, Artificial Sequence; identical to SEQ ID NO: 1805
  OXM analog
  MOD_RES (2)..(2): X=aminoisobutyric acid
  MOD_RES (38)..(38): Xaa=Cys(mPEG)2 40kDa
  MOD_RES (38)..(38): C-terminal amidation

SEQ ID NO: 1812 - protein, 38 aa, Artificial Sequence; identical to SEQ ID NO: 1805
  OXM analog
  MOD_RES (2)..(2): Xaa=aminoisobutyric acid
  MOD_RES (38)..(38): Xaa=Cys(cholest-5-en-3-yl{[(2R)-3-amino-2-(amino)- 3-oxopropyl]thio}acetate)
  MOD_RES (38)..(38): C-terminal amidation

SEQ ID NO: 1813 - protein, 38 aa, Artificial Sequence
  OXM analog
  MOD_RES (2)..(2): Xaa=aminoisobutyric acid
  MOD_RES (27)..(27): Xaa=methionine sulfoxide
  MOD_RES (38)..(38): Xaa=Cys(mPEG)240kDa
  MOD_RES (38)..(38): C-terminal amidation
HXQGTFTSDYSKYLDSRRAQDFVQWLXNTKRNRNNIAX

SEQ ID NO: 1814 - protein, 38 aa, Artificial Sequence; identical to SEQ ID NO: 1813
  OXM analog
  MOD_RES (2)..(2): Xaa=Aib
  MOD_RES (27)..(27): Xaa=methionine sulfoxide
  MOD_RES (38)..(38): Xaa=Cys(mPEG)260kDa
  MOD_RES (38)..(38): C-terminal amidation

SEQ ID NO: 1815 - protein, 37 aa, Artificial Sequence
  OXM analog
  MOD_RES (2)..(2): Xaa=Aib
  MOD_RES (20)..(20): Xaa=Cys(mPEG)240kDa
  MOD_RES (37)..(37): C-terminal amidation
HXQGTFTSDYSKYLDSRRAXDFVQWLMNTKRNRNNIA

SEQ ID NO: 1816 - protein, 37 aa, Artificial Sequence
  OXM analog
  MOD_RES (2)..(2): Xaa=Aib
  MOD_RES (21)..(21): Xaa=Cys(mPEG)240kDa
  MOD_RES (37)..(37): C-terminal amidation
HXQGTFTSDYSKYLDSRRAQXFVQWLMNTKRNRNNIA

SEQ ID NO: 1817 - protein, 37 aa, Artificial Sequence
  OXM analog
  MOD_RES (2)..(2): Aib
  MOD_RES (24)..(24): Xaa=Cys(mPEG)240kDa
  MOD_RES (27)..(27): Xaa=metionine sulfoxide
  MOD_RES (37)..(37): C-terminal amidation
HXQGTFTSDYSKYLDSRRAQDFVXWLXNTKRNRNNIA

SEQ ID NO: 1818 - protein, 37 aa, Artificial Sequence
  OXM analog
  MOD_RES (2)..(2): Xaa=Aib
  MOD_RES (28)..(28): Xaa=Cys(mPEG)240kDa
  MOD_RES (37)..(37): C-terminal amidation
HXQGTFTSDYSKYLDSRRAQDFVQWLMXTKRNRNNIA

SEQ ID NO: 1819 - protein, 38 aa, Artificial Sequence; identical to SEQ ID NO: 1805
  OXM analog
  MOD_RES (2)..(2): Xaa=D-serine
  MOD_RES (38)..(38): Xaa=Lys(palmitoyl)
  MOD_RES (38)..(38): C-terminal amidation

SEQ ID NO: 1820 - protein, 38 aa, Artificial Sequence
  OXM analog
  MOD_RES (1)..(1): Xaa=desamino-His (deltaNH2-H)
  MOD_RES (2)..(2): Xaa=Aib
  MOD_RES (27)..(27): Xaa=mrtionine sulfoxide
  MOD_RES (38)..(38): Xaa=Cys(mPEG)240kDa
  MOD_RES (38)..(38): C-terminal amidation
XXQGTFTSDYSKYLDSRRAQDFVQWLXNTKRNRNNIAX

SEQ ID NO: 1821 - protein, 38 aa, Artificial Sequence; identical to SEQ ID NO: 1805
  OXM analog
  MOD_RES (2)..(2): xaa=D-serine
  MOD_RES (38)..(38): Xaa=Cys(cholest-5-en-3-yl 1-{[(2R)-3-amino-2-(amino)-3-oxopropyl]thio}-2-oxo -6,9,12,15-tetraoxa-3-azaoctadecan-18-oate]) or Cys(Oxa4-cholesterol))
  MOD_RES (38)..(38): C-terminal amidation

SEQ ID NO: 1822 - protein, 37 aa, Artificial Sequence
  OXM analog
  MOD_RES (2)..(2): Xaa=Aib
  MOD_RES (11)..(11): Xaa=Cys(mPEG)240kDa
  MOD_RES (27)..(27): Xaa=methionine sulfoxide
  MOD_RES (37)..(37): C-terminal amidation
HXQGTFTSDYXKYLDSRRAQDFVQWLXNTKRNRNNIA

SEQ ID NO: 1823 - protein, 37 aa, Artificial Sequence
  OXM analog
  MOD_RES (2)..(2): Xaa=Aib
  MOD_RES (12)..(12): Xaa=Cys(mPEG)240kDa
  MOD_RES (27)..(27): Xaa=Methionine sulfoxide
  MOD_RES (37)..(37): C-terminal amidation
HXQGTFTSDYSXYLDSRRAQDFVQWLXNTKRNRNNIA

SEQ ID NO: 1824 - protein, 38 aa, Artificial Sequence; identical to SEQ ID NO: 1805
  OXM analog
  MOD_RES (2)..(2): Xaa=Aib
  MOD_RES (38)..(38): Xaa=Lys(palmitoyl)
  MOD_RES (38)..(38): C-terminal amidation

SEQ ID NO: 1825 - protein, 38 aa, Artificial Sequence
  OXM analog
  MOD_RES (2)..(2): Xaa=Aib
  MOD_RES (27)..(27): Xaa=Nle
  MOD_RES (38)..(38): C-terminal amidation
HXQGTFTSDYSKYLDSRRAQDFVQWLXNTKRNRNNIAC

SEQ ID NO: 1826 - protein, 38 aa, Artificial Sequence; identical to SEQ ID NO: 1825
  OXM analog
  MOD_RES (2)..(2): Xaa=Aib
  MOD_RES (27)..(27): Xaa=O-methyl-L-homoserine
  MOD_RES (38)..(38): C-terminal amidation

SEQ ID NO: 1827 - protein, 38 aa, Artificial Sequence; identical to SEQ ID NO: 1813
  OXM analog
  MOD_RES (2)..(2): Xaa=Aib
  MOD_RES (27)..(27): Xaa=Nle
  MOD_RES (38)..(38): Xaa=Cys(cholest-5-en-3-yl{[(2R)-3-amino-2-(amino)- 3-oxopropyl]thio}acetate)
  MOD_RES (38)..(38): C-terminal amidation

SEQ ID NO: 1828 - protein, 38 aa, Artificial Sequence; identical to SEQ ID NO: 1813
  OXM analog
  MOD_RES (2)..(2): Xaa=Aib
  MOD_RES (27)..(27): Xaa=O-methyl-L-homoserine
  MOD_RES (38)..(38): Xaa=Cys(cholest-5-en-3-yl{[(2R)-3-amino-2-(amino)- 3-oxopropyl]thio}acetate)
  MOD_RES (38)..(38): C-terminal amidation

SEQ ID NO: 1829 - protein, 38 aa, Artificial Sequence; identical to SEQ ID NO: 1805
  OXM analog
  MOD_RES (2)..(2): Xaa=Aib
  MOD_RES (38)..(38): Xaa=Cys(cholest-5-en-3-yl 1-{[(2R)-3-amino-2-(amino)-3-oxopropyl]thio}-2-oxo -6,9,12,15-tetraoxa-3-azaoctadecan-18-oate]) or Cys(Oxa4-cholesterol))
  MOD_RES (38)..(38): C-terminal amidation

SEQ ID NO: 1830 - protein, 38 aa, Artificial Sequence; identical to SEQ ID NO: 1804
  OXM analog
  MOD_RES (2)..(2): Xaa=D-serine
  MOD_RES (38)..(38): C-terminal amidation

SEQ ID NO: 1831 - protein, 38 aa, Artificial Sequence; identical to SEQ ID NO: 1813
  OXM analog
  MOD_RES (2)..(2): Xaa=D-serine
  MOD_RES (27)..(27): Xaa=metionine sulfoxide
  MOD_RES (38)..(38): Xaa=Cys(cholest-5-en-3-yl 1-{[(2R)-3-amino-2-(amino)-3-oxopropyl]thio}-2-oxo -6,9,12,15-tetraoxa-3-azaoctadecan-18-oate]) or Cys(Oxa4-cholesterol))
  MOD_RES (38)..(38): C-terminal amidation

SEQ ID NO: 1832 - protein, 38 aa, Artificial Sequence; identical to SEQ ID NO: 1813
  OXM analog
  MOD_RES (2)..(2): Xaa=D-serine
  MOD_RES (27)..(27): Xaa=methionine sulfoxide
  MOD_RES (38)..(38): Xaa=Cys(CH2CONH2)
  MOD_RES (38)..(38): C-terminal amidation

SEQ ID NO: 1833 - protein, 37 aa, Artificial Sequence
  OXM analog
  MOD_RES (2)..(2): Xaa=1-Amino-1-cyclohexane carboxylic acid
  MOD_RES (37)..(37): C-terminal amidation
HXQGTFTSDYSKYLDSRRAQDFVQWLMNTKRNRNNIA

SEQ ID NO: 1834 - protein, 37 aa, Artificial Sequence; identical to SEQ ID NO: 1833
  OXM analog
  MOD_RES (2)..(2): Xaa=Abu
  MOD_RES (37)..(37): C-terminal amidation

SEQ ID NO: 1835 - protein, 37 aa, Artificial Sequence; identical to SEQ ID NO: 1833
  OXM analog
  MOD_RES (2)..(2): Xaa=D-abu
  MOD_RES (37)..(37): C-terminal amidation

SEQ ID NO: 1836 - protein, 37 aa, Artificial Sequence; identical to SEQ ID NO: 1833
  OXM analog
  MOD_RES (2)..(2): Xaa=Nva (Aminovaleric acid)
  MOD_RES (37)..(37): C-terminal amidation

SEQ ID NO: 1837 - protein, 37 aa, Artificial Sequence; identical to SEQ ID NO: 1833
  OXM analog
  MOD_RES (2)..(2): Xaa= beta-cyclopropyl-alanine
  MOD_RES (37)..(37): C-terminal amidation

SEQ ID NO: 1838 - protein, 37 aa, Artificial Sequence; identical to SEQ ID NO: 1833
  OXM analog
  MOD_RES (2)..(2): Xaa=propargylglycine
  MOD_RES (37)..(37): C-terminal amidation

SEQ ID NO: 1839 - protein, 37 aa, Artificial Sequence; identical to SEQ ID NO: 1833
  OXM analog
  MOD_RES (2)..(2): Xaa=Allylglycine
  MOD_RES (37)..(37): C-terminal amidation

SEQ ID NO: 1840 - protein, 37 aa, Artificial Sequence; identical to SEQ ID NO: 1833
  OXM analog
  MOD_RES (2)..(2): Xaa=2-Amino-2-cyclohexyl-propanoic acid
  MOD_RES (37)..(37): C-terminal amidation

SEQ ID NO: 1841 - protein, 37 aa, Artificial Sequence; identical to SEQ ID NO: 1833
  OXM analog
  MOD_RES (2)..(2): Xaa=D-tertbutylglycine
  MOD_RES (37)..(37): C-terminal amidation

SEQ ID NO: 1842 - protein, 37 aa, Artificial Sequence; identical to SEQ ID NO: 1833
  OXM analog
  MOD_RES (2)..(2): Xaa=Vinylglycine
  MOD_RES (37)..(37): C-terminal amidation

SEQ ID NO: 1843 - protein, 37 aa, Artificial Sequence; identical to SEQ ID NO: 1833
  OXM analog
  MOD_RES (2)..(2): Xaa=1-Amino-1-cyclopropane carboxylic acid
  MOD_RES (37)..(37): C-terminal amidation

SEQ ID NO: 1844 - protein, 37 aa, Artificial Sequence; identical to SEQ ID NO: 1833
  OXM analog
  MOD_RES (2)..(2): Xaa=1-Amino-1-cyclobutane carboxylic acid
  MOD_RES (37)..(37): C-terminal amidation

SEQ ID NO: 1845 - protein, 37 aa, Artificial Sequence; identical to SEQ ID NO: 1833
  OXM analog
  MOD_RES (2)..(2): Xaa=1-Amino-1-cyclopentane carboxylic acid
  MOD_RES (37)..(37): C-terminal amidation

SEQ ID NO: 1846 - protein, 38 aa, Artificial Sequence
  OXM analog
  MOD_RES (2)..(2): Xaa=D-serine
  MOD_RES (38)..(38): C-terminal amidation
HXQGTFTSDYSKYLDSEAAQDFVQWLMNTKRNRNNIAC

SEQ ID NO: 1847 - protein, 31 aa, Artificial Sequence
  OXM analog
  MOD_RES (2)..(2): Xaa=D-serine
  MOD_RES (31)..(31): C-terminal amidation
HXQGTFTSDYSKYLDSRRAQDFVQWLMNTKC

SEQ ID NO: 1848 - protein, 31 aa, Artificial Sequence
  OXM analog
  MOD_RES (2)..(2): Xaa=D-serine
  MOD_RES (31)..(31): C-terminal amidation
HXQGTFTSDYSKYLDSEAAQDFVQWLMNTKC

SEQ ID NO: 1849 - protein, 31 aa, Artificial Sequence
  OXM analog
  MOD_RES (2)..(2): Xaa=D-serine
  MOD_RES (31)..(31): C-terminal amidation
HXQGTFTSDYSKYLDSERAQDFVQWLMNTKC

SEQ ID NO: 1850 - protein, 31 aa, Artificial Sequence
  OXM analog
  MOD_RES (2)..(2): Xaa=D-serine
  MOD_RES (31)..(31): C-terminal amidation
HXQGTFTSDYSKYLDSRAAQDFVQWLMNTKC

SEQ ID NO: 1851 - protein, 38 aa, Artificial Sequence
  OXM analog
  MOD_RES (2)..(2): Xaa=D-serine
  MOD_RES (38)..(38): Xaa=Cys(cholest-5-en-3-yl 1-{[(2R)-3-amino-2-(amino)-3-oxopropyl]thio}-2-oxo -6,9,12,15-tetraoxa-3-azaoctadecan-18-oate]) or Cys(Oxa4-cholesterol))
  MOD_RES (38)..(38): C-terminal amidation
HXQGTFTSDYSKYLDSEAAQDFVQWLMNTKRNRNNIAX

SEQ ID NO: 1852 - protein, 31 aa, Artificial Sequence
  OXM analog
  MOD_RES (2)..(2): Xaa=D-serine
  MOD_RES (31)..(31): Xaa=Cys(cholest-5-en-3-yl 1-{[(2R)-3-amino-2-(amino)-3-oxopropyl]thio}-2-oxo -6,9,12,15-tetraoxa-3-azaoctadecan-18-oate]) or Cys(Oxa4-cholesterol))
  MOD_RES (31)..(31): C-terminal amidation
HXQGTFTSDYSKYLDSRRAQDFVQWLMNTKX

SEQ ID NO: 1853 - protein, 31 aa, Artificial Sequence
  OXM analog
  MOD_RES (2)..(2): X=D-serine
  MOD_RES (31)..(31): Xaa=Cys(cholest-5-en-3-yl 1-{[(2R)-3-amino-2-(amino)-3-oxopropyl]thio}-2-oxo -6,9,12,15-tetraoxa-3-azaoctadecan-18-oate]) or Cys(Oxa4-cholesterol))
  MOD_RES (31)..(31): C-terminal amidation
HXQGTFTSDYSKYLDSEAAQDFVQWLMNTKX

SEQ ID NO: 1854 - protein, 31 aa, Artificial Sequence
  OXM analog
  MOD_RES (2)..(2): Xaa=D-serine
  MOD_RES (31)..(31): Xaa=Cys(cholest-5-en-3-yl 1-{[(2R)-3-amino-2-(amino)-3-oxopropyl]thio}-2-oxo -6,9,12,15-tetraoxa-3-azaoctadecan-18-oate]) or Cys(Oxa4-cholesterol))
  MOD_RES (31)..(31): C-terminal amidation
HXQGTFTSDYSKYLDSERAQDFVQWLMNTKX

SEQ ID NO: 1855 - protein, 31 aa, Artificial Sequence
  OXM analog
  MOD_RES (2)..(2): Xaa=D-serine
  MOD_RES (31)..(31): Xaa=Cys(cholest-5-en-3-yl 1-{[(2R)-3-amino-2-(amino)-3-oxopropyl]thio}-2-oxo -6,9,12,15-tetraoxa-3-azaoctadecan-18-oate]) or Cys(Oxa4-cholesterol))
  MOD_RES (31)..(31): C-terminal amidation
HXQGTFTSDYSKYLDSRAAQDFVQWLMNTKX

SEQ ID NO: 1856 - protein, 31 aa, Artificial Sequence; identical to SEQ ID NO: 1852
  OXM analog
  MOD_RES (2)..(2): Xaa=D-serine
  MOD_RES (31)..(31): Xaa=Lys(Palmitoyl)
  MOD_RES (31)..(31): C-terminal amidation

SEQ ID NO: 1857 - protein, 31 aa, Artificial Sequence; identical to SEQ ID NO: 1853
  OXM analog
  MOD_RES (2)..(2): Xaa=D-serine
  MOD_RES (31)..(31): Xaa=Lys(palmitoyl)
  MOD_RES (31)..(31): C-terminal amidation

SEQ ID NO: 1858 - protein, 32 aa, Artificial Sequence
  OXM analog
  MOD_RES (2)..(2): Xaa=D-serine
  MOD_RES (31)..(31): Xaa=Ttds
  MOD_RES (32)..(32): Xaa=Lys(Palmitoyl)
  MOD_RES (32)..(32): C-terminal amidation
HXQGTFTSDYSKYLDSRRAQDFVQWLMNTKXX

SEQ ID NO: 1859 - protein, 32 aa, Artificial Sequence
  OXM analog
  MOD_RES (2)..(2): Xaa=D-serine
  MOD_RES (31)..(31): Xaa=Ttds
  MOD_RES (32)..(32): Xaa=Lys(Palmitoyl)
  MOD_RES (32)..(32): C-terminal amidation
HXQGTFTSDYSKYLDSEAAQDFVQWLMNTKXX

SEQ ID NO: 1860 - protein, 32 aa, Artificial Sequence; identical to SEQ ID NO: 1858
  OXM analog
  MOD_RES (2)..(2): Xaa=D-serine
  MOD_RES (31)..(31): Xaa=gamma glutamic acid
  MOD_RES (32)..(32): Xaa=Cys(cholest-5-en-3-yl{[(2R)-3-amino-2-(amino)- 3-oxopropyl]thio}acetate)
  MOD_RES (32)..(32): C-terminal amidation

SEQ ID NO: 1861 - protein, 32 aa, Artificial Sequence; identical to SEQ ID NO: 1859
  OXM analog
  MOD_RES (2)..(2): Xaa=D-serine
  MOD_RES (31)..(31): Xaa=gamma glutamic acid
  MOD_RES (32)..(32): Xaa=Cys(cholest-5-en-3-yl{[(2R)-3-amino-2-(amino)- 3-oxopropyl]thio}acetate)
  MOD_RES (32)..(32): C-terminal amidation

SEQ ID NO: 1862 - protein, 31 aa, Artificial Sequence; identical to SEQ ID NO: 1853
  OXM analog
  MOD_RES (2)..(2): Xaa=Aib
  MOD_RES (31)..(31): Xaa= Cys(cholest-5-en-3-yl 1-{[(2R)-3-amino-2-(amino)-3-oxopropyl]thio}-2-oxo -6,9,12,15-tetraoxa-3-azaoctadecan-18-oate]) or Cys(Oxa4-cholesterol))
  MOD_RES (31)..(31): C-terminal amidation

SEQ ID NO: 1863 - protein, 39 aa, Artificial Sequence
  OXM analog
  MOD_RES (2)..(2): Xaa=D-serine
  MOD_RES (38)..(38): Xaa=gamma glutamic acid
  MOD_RES (39)..(39): Xaa=Cys(cholest-5-en-3-yl{[(2R)-3-amino-2-(amino)- 3-oxopropyl]thio}acetate)
  MOD_RES (39)..(39): C-terminal amidation
HXQGTFTSDYSKYLDSEAAQDFVQWLMNTKRNRNNIAXX

SEQ ID NO: 1864 - protein, 32 aa, Artificial Sequence
  OXM analog
  MOD_RES (2)..(2): Xaa=D-serine
  MOD_RES (32)..(32): Xaa=Cys(cholest-5-en-3-yl 1-{[(2R)-3-amino-2-(amino)-3-oxopropyl]thio}-2-oxo -6,9,12,15-tetraoxa-3-azaoctadecan-18-oate]) or Cys(Oxa4-cholesterol))
  MOD_RES (32)..(32): C-terminal amidation
HXQGTFTSDYSKYLDSEAAQDFVQWLMNTKRX

SEQ ID NO: 1865 - protein, 38 aa, Artificial Sequence; identical to SEQ ID NO: 1851
  OXM analog
  MOD_RES (2)..(2): Xaa=D-serine
  MOD_RES (38)..(38): Xaa=Cys(cholest-5-en-3-yl 1-{[(2R)-3-amino-2-(amino)-3-oxopropyl]thio}-2-oxo -6,9,12,15-tetraoxa-3-azaoctadecan-18-oate]) or Cys(Oxa4-cholesterol))

SEQ ID NO: 1866 - protein, 31 aa, Artificial Sequence; identical to SEQ ID NO: 1854
  OXM analog
  MOD_RES (2)..(2): Xaa=Aib
  MOD_RES (31)..(31): Xaa=Cys(cholest-5-en-3-yl 1-{[(2R)-3-amino-2-(amino)-3-oxopropyl]thio}-2-oxo -6,9,12,15-tetraoxa-3-azaoctadecan-18-oate]) or Cys(Oxa4-cholesterol))
  MOD_RES (31)..(31): C-terminal amidation

SEQ ID NO: 1867 - protein, 32 aa, Artificial Sequence; identical to SEQ ID NO: 1858
  OXM analog
  MOD_RES (2)..(2): Xaa=Aib
  MOD_RES (31)..(31): Xaa=gamma glutamic acid
  MOD_RES (32)..(32): Xaa=Cys(cholest-5-en-3-yl{[(2R)-3-amino-2-(amino)- 3-oxopropyl]thio}acetate)

SEQ ID NO: 1868 - protein, 39 aa, Artificial Sequence; identical to SEQ ID NO: 1863
  OXM analog
  MOD_RES (2)..(2): Xaa=D-serine
  MOD_RES (38)..(38): Xaa=gamma glutamic acid
  MOD_RES (39)..(39): Xaa=Lys(Palmitoyl)
  MOD_RES (39)..(39): C-terminal amidation

SEQ ID NO: 1869 - protein, 33 aa, Artificial Sequence
  OXM analog
  MOD_RES (2)..(2): Xaa=D-serine
  MOD_RES (31)..(32): Xaa=gamma glutamic acid
  MOD_RES (33)..(33): Xaa=Cys(cholest-5-en-3-yl{[(2R)-3-amino-2-(amino)- 3-oxopropyl]thio}acetate)
HXQGTFTSDYSKYLDSRRAQDFVQWLMNTKXXX

SEQ ID NO: 1870 - protein, 32 aa, Artificial Sequence
  OXM analog
  MOD_RES (2)..(2): Xaa=D-serine
  MOD_RES (31)..(31): Xaa=gamma glutamic acid
  MOD_RES (32)..(32): Xaa=Cys(cholest-5-en-3-yl 1{[(2R)-3-amino-2-(amino)-3-oxopropyl]thio}acetate )
HXQGTFTSDYSSYLDSRRAQDFVQWLMNTKXX

SEQ ID NO: 1871 - protein, 32 aa, Artificial Sequence
  OXM analog
  MOD_RES (2)..(2): Xaa=D-serine
  MOD_RES (31)..(31): Xaa=gamma glutamic acid
  MOD_RES (32)..(32): Xaa=Cys(cholest-5-en-3-yl 1{[(2R)-3-amino-2-(amino)-3-oxopropyl]thio}acetate );
HXQGTFTSDYSKYLDSRAAQDFVQWLMNTKXX

SEQ ID NO: 1872 - protein, 32 aa, Artificial Sequence; identical to SEQ ID NO: 1870
  OXM analog
  MOD_RES (2)..(2): Xaa=D-serine
  MOD_RES (31)..(31): Xaa=gamma glutamic acid
  MOD_RES (32)..(32): Xaa=Cys(cholest-5-en-3-yl 1-{[(2R)-3-amino-2-(amino)-3-oxopropyl]thio}-2-oxo -6,9,12,15-tetraoxa-3-azaoctadecan-18-oate]) or Cys(Oxa4-cholesterol)

SEQ ID NO: 1873 - protein, 32 aa, Artificial Sequence; identical to SEQ ID NO: 1871
  OXM analog
  MOD_RES (2)..(2): Xaa=D-serine
  MOD_RES (31)..(31): Xaa=gamma glutamic acid
  MOD_RES (32)..(32): Xaa=Cys(cholest-5-en-3-yl 1-{[(2R)-3-amino-2-(amino)-3-oxopropyl]thio}-2-oxo -6,9,12,15-tetraoxa-3-azaoctadecan-18-oate]) or Cys(Oxa4-cholesterol)

SEQ ID NO: 1874 - protein, 32 aa, Artificial Sequence
  OXM analog
  MOD_RES (2)..(2): Xaa=D-serine
  MOD_RES (31)..(31): Xaa=gamma glutamic acid
  MOD_RES (32)..(32): Xaa=Cys(cholest-5-en-3-yl 1{[(2R)-3-amino-2-(amino)-3-oxopropyl]thio}acetate )
HXQGTFTSDYSKYLDERRAQDFVQWLMNTKXX

SEQ ID NO: 1875 - protein, 32 aa, Artificial Sequence; identical to SEQ ID NO: 1874
  OXM analog
  MOD_RES (2)..(2): Xaa=D-serine
  MOD_RES (31)..(31): Xaa=gamma glutamic acid
  MOD_RES (32)..(32): Xaa=Cys(cholest-5-en-3-yl 1-{[(2R)-3-amino-2-(amino)-3-oxopropyl]thio}-2-oxo -6,9,12,15-tetraoxa-3-azaoctadecan-18-oate]) or Cys(Oxa4-cholesterol)

SEQ ID NO: 1876 - protein, 33 aa, Artificial Sequence; identical to SEQ ID NO: 1869
  OXM analog
  MOD_RES (2)..(2): Xaa=D-serine
  MOD_RES (31)..(32): Xaa=gamma glutamic acid
  MOD_RES (33)..(33): Xaa=Cys(cholest-5-en-3-yl 1-{[(2R)-3-amino-2-(amino)-3-oxopropyl]thio}-2-oxo -6,9,12,15-tetraoxa-3-azaoctadecan-18-oate]) or Cys(Oxa4-cholesterol)

SEQ ID NO: 1877 - protein, 33 aa, Artificial Sequence; identical to SEQ ID NO: 1869
  OXM analog
  MOD_RES (2)..(2): Xaa=D-serine
  MOD_RES (31)..(32): Xaa=gamma glutamic acid
  MOD_RES (33)..(33): Xaa=S-{1-[46-(cholest-5-en-3-yloxy)-3,43,46-trioxo -7,10,13,16,19,22,25,28,31,34,37,40-dodecaoxa-4,44 -diazahexatetracont-1-yl]-2,5-dioxopyrrolidin-3-yl }-L-cysteine or Cys (mal-oxa12-cholesterol)

SEQ ID NO: 1878 - protein, 33 aa, Artificial Sequence; identical to SEQ ID NO: 1869
  OXM analog
  MOD_RES (2)..(2): Xaa=Aib
  MOD_RES (31)..(32): Xaa=gamma glutamic acid
  MOD_RES (33)..(33): Xaa== Cys(cholest-5-en-3-yl 1-{[(2R)-3-amino-2-(amino)-3-oxopropyl]thio}-2-oxo -6,9,12,15-tetraoxa-3-azaoctadecan-18-oate]) or Cys(Oxa4-cholesterol)

SEQ ID NO: 1879 - protein, 33 aa, Artificial Sequence; identical to SEQ ID NO: 1869
  OXM analog
  MOD_RES (2)..(2): Xaa=1-Amino-1-cyclobutane carboxylic acid
  MOD_RES (31)..(32): Xaa=gamma glutamic acid
  MOD_RES (33)..(33): Xaa=Cys(cholest-5-en-3-yl 1-{[(2R)-3-amino-2-(amino)-3-oxopropyl]thio}-2-oxo -6,9,12,15-tetraoxa-3-azaoctadecan-18-oate]) or Cys(Oxa4-cholesterol)

SEQ ID NO: 1880 - protein, 33 aa, Artificial Sequence
  OXM analog
  MOD_RES (2)..(2): Xaa=D-serine
  MISC_FEATURE (16)..(20): Lactam bridge between side chains
  MOD_RES (31)..(32): Xaa=gamma glutamic acid
  MOD_RES (33)..(33): Xaa=S-[42-(cholest-5-en-3-yloxy)-2,42-dioxo-6,9,12 ,15,18,21,24,27,30,33,36,39-dodecaoxa-3-azadotetra cont-1-yl]-L-cysteine or Cys (oxa12-cholesterol)
HXQGTFTSDYSKYLDERRAKDFVQWLMNTKXXX

SEQ ID NO: 1881 - protein, 33 aa, Artificial Sequence; identical to SEQ ID NO: 1880
  OXM analog
  MOD_RES (2)..(2): Xaa=Aib
  MISC_FEATURE (16)..(20): Lactam bridge between side chains
  MOD_RES (31)..(32): Xaa=gamma glutamic acid
  MOD_RES (33)..(33): Xaa=S-[42-(cholest-5-en-3-yloxy)-2,42-dioxo-6,9,12 ,15,18,21,24,27,30,33,36,39-dodecaoxa-3-azadotetra cont-1-yl]-L-cysteine or Cys (oxa12-cholesterol)

SEQ ID NO: 1882 - protein, 33 aa, Artificial Sequence; identical to SEQ ID NO: 1880
  OXM analog
  MOD_RES (2)..(2): Xaa=1-Amino-1-cyclobutane carboxylic acid
  MISC_FEATURE (16)..(20): Lactam bridge between side chains
  MOD_RES (31)..(32): Xaa=gamma glutamic acid
  MOD_RES (33)..(33): Xaa=S-[42-(cholest-5-en-3-yloxy)-2,42-dioxo-6,9,12 ,15,18,21,24,27,30,33,36,39-dodecaoxa-3-azadotetra cont-1-yl]-L-cysteine or Cys (oxa12-cholesterol)

SEQ ID NO: 1883 - protein, 33 aa, Artificial Sequence; identical to SEQ ID NO: 1869
  OXM analog
  MOD_RES (2)..(2): Xaa=D-serine
  MOD_RES (31)..(32): Xaa=gamma glutamic acid
  MOD_RES (33)..(33): Xaa=S-[42-(cholest-5-en-3-yloxy)-2,42-dioxo-6,9,12 ,15,18,21,24,27,30,33,36,39-dodecaoxa-3-azadotetra cont-1-yl]-L-cysteine or Cys (oxa12-cholesterol)

SEQ ID NO: 1884 - protein, 33 aa, Artificial Sequence; identical to SEQ ID NO: 1869
  OXM analog
  MOD_RES (2)..(2): Xaa=Aib
  MOD_RES (31)..(32): Xaa=gamma glutamic acid
  MOD_RES (33)..(33): Xaa=S-[42-(cholest-5-en-3-yloxy)-2,42-dioxo-6,9,12 ,15,18,21,24,27,30,33,36,39-dodecaoxa-3-azadotetra cont-1-yl]-L-cysteine or Cys (oxa12-cholesterol)

SEQ ID NO: 1885 - protein, 33 aa, Artificial Sequence; identical to SEQ ID NO: 1869
  OXM analog
  MOD_RES (2)..(2): Xaa=1-Amino-1-cyclobutane carboxylic acid
  MOD_RES (31)..(32): Xaa=gamma glutamic acid
  MOD_RES (33)..(33): Xaa=S-[42-(cholest-5-en-3-yloxy)-2,42-dioxo-6,9,12 ,15,18,21,24,27,30,33,36,39-dodecaoxa-3-azadotetra cont-1-yl]-L-cysteine or Cys (oxa12-cholesterol)

SEQ ID NO: 1886 - protein, 33 aa, Artificial Sequence; identical to SEQ ID NO: 1869
  OXM analog
  MOD_RES (2)..(2): Xaa=D-serine
  MOD_RES (31)..(32): Xaa=gamma glutamic acid
  MOD_RES (33)..(33): Xaa=Lys(gamma-glutamic acid-palmitoyl)
  MOD_RES (33)..(33): C-terminal amidation

SEQ ID NO: 1887 - protein, 33 aa, Artificial Sequence
  OXM analog
  MOD_RES (2)..(2): Xaa=D-serine
  MOD_RES (31)..(32): Xaa=gamma glutamic acid
  MOD_RES (33)..(33): Xaa=S-[42-(cholest-5-en-3-yloxy)-2,42-dioxo-6,9,12 ,15,18,21,24,27,30,33,36,39-dodecaoxa-3-azadotetra cont-1-yl]-L-cysteine or Cys (oxa12-cholesterol)
  MOD_RES (33)..(33): C-terminal amidation
HXQGTFTSDYSKYLDERRAQDFVQWLMNTKXXX

SEQ ID NO: 1888 - protein, 32 aa, Artificial Sequence
  OXM analog
  MOD_RES (2)..(2): Xaa=D-serine
  MOD_RES (20)..(20): Xaa=Lys(gamma-glutamic acid-palmitoyl)
  MOD_RES (31)..(32): Xaa=gamma glutamic acid
  MOD_RES (32)..(32): C-terminal amidation
HXQGTFTSDYSKYLDSRRAXDFVQWLMNTKXX

SEQ ID NO: 1889 - protein, 31 aa, Artificial Sequence
  OXM analog
  MOD_RES (2)..(2): Xaa=D-serine
  MOD_RES (20)..(20): Xaa=Lys(gamma-glutamic acid-gamma-glutamic acid-palmitoyl)
  MOD_RES (31)..(31): Xaa=gamma glutamic acid
  MOD_RES (31)..(31): C-terminal amidation
HXQGTFTSDYSKYLDSRRAXDFVQWLMNTKX

SEQ ID NO: 1890 - protein, 30 aa, Artificial Sequence
  OXM analog
  MOD_RES (2)..(2): Xaa=D-serine
  MOD_RES (10)..(10): Xaa=Lys(gamma-glutamic acid-gamma-glutamic acid-palmitoyl)
  MOD_RES (30)..(30): C-terminal amidation
HXQGTFTSDXSKYLDSRRAQDFVQWLMNTK

SEQ ID NO: 1891 - protein, 30 aa, Artificial Sequence
  OXM analog
  MOD_RES (2)..(2): Xaa=D-serine
  MOD_RES (20)..(20): Xaa=Lys(gamma-glutamic acid-gamma-glutamic acid-palmitoyl)
  MOD_RES (30)..(30): C-terminal amidation
HXQGTFTSDYSKYLDERRAXDFVQWLMNTK

SEQ ID NO: 1892 - protein, 30 aa, Artificial Sequence
  OXM analog
  MOD_RES (2)..(2): Xaa=D-serine
  MOD_RES (10)..(10): Xaa=Lys(gamma-glutamic acid-gamma-glutamic acid-palmitoyl)
  MOD_RES (30)..(30): C-terminal amidation
HXQGTFTSDXSKYLDERRAQDFVQWLMNTK

SEQ ID NO: 1893 - protein, 33 aa, Artificial Sequence; identical to SEQ ID NO: 1869
  OXM analog
  MOD_RES (2)..(2): Xaa=D-serine
  MOD_RES (31)..(32): Xaa=gamma glutamic acid
  MOD_RES (33)..(33): Xaa=S-[78-(cholest-5-en-3-yloxy)-2,78-dioxo-6,9,12 ,15,18,21,24,27,30,33,36,39,42,45,48,51,54,57,60,6 3,66,69,72,75-tetracosaoxa-3-azaoctaheptacont-1-yl ]-L-cysteine or Cys (oxa24-cholesterol)

SEQ ID NO: 1894 - protein, 33 aa, Artificial Sequence
  OXM analog
  MOD_RES (2)..(2): Xaa=Aib
  MOD_RES (24)..(24): Xaa=Lys(DOTA)
  MOD_RES (27)..(27): Xaa=methionine sulfoxide
  MOD_RES (31)..(32): Xaa=gamma glutamic acid
  MOD_RES (33)..(33): Xaa=S-[42-(cholest-5-en-3-yloxy)-2,42-dioxo-6,9,12 ,15,18,21,24,27,30,33,36,39-dodecaoxa-3-azadotetra cont-1-yl]-L-cysteine or Cys (oxa12-cholesterol)
  MOD_RES (33)..(33): C-terminal amidation
HXDGTFTSDYSKYLDSRRAQDFVXWLXNTKXXX

SEQ ID NO: 1895 - protein, 31 aa, Artificial Sequence
  OXM analog
  MOD_RES (2)..(2): Xaa=D-serine
  MOD_RES (10)..(10): Xaa=Lys(gamma glutamic acid-palmitoyl)
  MOD_RES (31)..(31): Xaa=gamma glutamic acid
  MOD_RES (31)..(31): C-terminal amidation
HXQGTFTSDXSKYLDERRAQDFVQWLMNTKX

SEQ ID NO: 1896 - protein, 32 aa, Artificial Sequence
  OXM analog
  MOD_RES (2)..(2): Xaa=D-serine
  MOD_RES (10)..(10): Xaa=Lys(palmitoyl)
  MOD_RES (31)..(32): Xaa=gamma glutamic acid
  MOD_RES (32)..(32): C-terminal amidation
HXQGTFTSDXSKYLDERRAQDFVQWLMNTKXX

SEQ ID NO: 1897 - protein, 30 aa, Artificial Sequence; identical to SEQ ID NO: 1892
  OXM analog
  MOD_RES (2)..(2): Xaa=aib
  MOD_RES (10)..(10): Xaa=Lys(gamma-glutamic acid-gamma glutamic acid-palmitoyl)
  MOD_RES (30)..(30): C-terminal amidation

SEQ ID NO: 1898 - protein, 30 aa, Artificial Sequence; identical to SEQ ID NO: 1892
  OXM analog
  MOD_RES (2)..(2): Xaa=acb
  MOD_RES (10)..(10): Xaa=Lys(gamma-glutamic acid-gamma-glutamic acid-palmitoyl
  MOD_RES (30)..(30): C-terminal amidation

SEQ ID NO: 1899 - protein, 31 aa, Artificial Sequence; identical to SEQ ID NO: 1895
  OXM analog
  MOD_RES (2)..(2): Xaa=D-Serine
  MOD_RES (10)..(10): Xaa=Lys(gamma-glutamic acid-gamma-glutamic acid-palmitoyl
  MOD_RES (16)..(16): Xaa=aib
  MOD_RES (31)..(31): Xaa=gamma glutamic acid
  MOD_RES (31)..(31): C-terminal amidation

SEQ ID NO: 1900 - protein, 33 aa, Artificial Sequence; identical to SEQ ID NO: 1869
  OXM analog
  MOD_RES (2)..(2): Xaa=aib
  MOD_RES (31)..(32): Xaa=gamma glutamic acid
  MOD_RES (33)..(33): Xaa=Lys(gamma glutamic acid-palmitoyl)
  MOD_RES (33)..(33): C-terminal amidation

SEQ ID NO: 1901 - protein, 33 aa, Artificial Sequence; identical to SEQ ID NO: 1869
  OXM analog
  MOD_RES (2)..(2): Xaa=acb
  MOD_RES (31)..(32): Xaa=gamma glutamic acid
  MOD_RES (33)..(33): Xaa=Lys(gamma glutamic acid-palmitoyl)
  MOD_RES (33)..(33): C-terminal amidation

SEQ ID NO: 1902 - protein, 33 aa, Artificial Sequence; identical to SEQ ID NO: 1869
  OXM analog
  MOD_RES (2)..(2): Xaa=D-serine
  MOD_RES (31)..(32): Xaa=gamma glutamic acid
  MOD_RES (33)..(33): Xaa=S-[38-(cholest-5-en-3-yloxy)-2-oxo-6,9,12,15,1 8,21,24,27,30,33,36-undecaoxa-3-azaoctatriacont-1- yl]-L-cysteine or Cys (oxa12-O-cholesterol)

SEQ ID NO: 1903 - protein, 30 aa, Artificial Sequence
  OXM analog
  VARIANT (2)..(2): Xaa=D-serine or Aib;
  VARIANT (17)..(17): Xaa=Arg or Glu
  VARIANT (18)..(18): Xaa=Arg or Ala
  VARIANT (27)..(27): Xaa=methionine, norleucine, or O-methyl-L-homoserine
HXQGTFTSDYSKYLDSXXAQDFVQWLXNTK

SEQ ID NO: 1904 - protein, 7 aa, Artificial Sequence
  OXM peptide
RNRNNIA

SEQ ID NO: 1905 - protein, 37 aa, Artificial Sequence
  OXM analog
  VARIANT (2)..(2): Xaa=D-serine; Aib; Acb; 1-Amino-1-cyclohexane carboxylic acid (Acx); alpha-aminobutyric acid(Abu); D- alpha-aminobutyric acid (D-Abu); Aminovaleric acid Nva); beta-cyclopropyl-alanine (Cpa); propargylglycine (Prg); Allylglycine (Alg);
  VARIANT (17)..(17): Xaa=Arg or Glu
  VARIANT (18)..(18): Xaa=Arg or Ala
  VARIANT (27)..(27): Xaa=methionine (M), norleucine (Nle), methionine sulfoxide (m) or O-methyl-L-homoserine (o)
HXQGTFTSDYSKYLDSXXAQDFVQWLXNTKRNRNNIA

SEQ ID NO: 1906 - protein, 37 aa, Artificial Sequence
  OXM analog
  VARIANT (2)..(2): Xaa = D-Ser,  Aib,  Acb, Acx,  Abu, D-Abu, Aminovaleric acid (Nva), Cpa, Prg, Alg, 2-Cha, D-tbg, Vg, Acp, or Acpe
  VARIANT (12)..(12): Xaa=Ser or Lys
  VARIANT (16)..(16): Xaa=Ser or Glu
  VARIANT (17)..(17): Xaa=Arg or Glu
  VARIANT (18)..(18): Xaa=Arg or Ala
  VARIANT (20)..(20): Xaa=Gln or Lys
  VARIANT (27)..(27): Xaa=a methionine, norleucine, methionine sulfoxide, or O-methyl-L-homoserine
HXQGTFTSDYSXYLDXXXAXDFVQWLXNTKRNRNNIA

SEQ ID NO: 1907 - protein, 31 aa, Artificial Sequence
  OXM analog
  VARIANT (2)..(2): Xaa = D-Ser,  Aib,  Acb, Acx,  Abu, D-Abu, Aminovaleric acid (Nva), Cpa, Prg, Alg, 2-Cha, D-tbg, Vg, Acp, or Acpe
  VARIANT (10)..(10): Xaa=Tyr or Lys
  VARIANT (12)..(12): Xaa=Ser or Lys
  VARIANT (16)..(16): Xaa=Ser or Glu
  VARIANT (17)..(17): Xaa=Arg or Glu
  VARIANT (18)..(18): Xaa=Arg or Ala
  VARIANT (20)..(20): Xaa=Gln or Lys
  VARIANT (27)..(27): Xaa=methionine, norleucine, methionine sulfoxide, or O-methyl-L-homoserine
  VARIANT (31)..(31): Xaa=optional, but when present is one or more gamma glutamic acid residues
HXQGTFTSDXSXYLDXXXAXDFVQWLXNTKX

SEQ ID NO: 1908 - protein, 31 aa, Artificial Sequence; identical to SEQ ID NO: 1907
  OXM analog
  MOD_RES (2)..(2): Xaa = D-Ser,  Aib,  Acb, Acx,  Abu, D-Abu, Aminovaleric acid (Nva), Cpa, Prg, Alg, 2-Cha, D-tbg, Vg, Acp, or Acpe
  MOD_RES (10)..(10): Xaa=Tyr or Lys
  MOD_RES (12)..(12): Xaa=Ser or Lys
  MOD_RES (16)..(16): Xaa=Ser or Lys
  MOD_RES (17)..(17): Xaa=Arg or Glu
  MOD_RES (18)..(18): Xaa=Arg or Ala
  MOD_RES (20)..(20): Xaa=Gln or Lys
  MOD_RES (27)..(27): Xaa=methionine, norleucine, methionine sulfoxide, or O-methyl-L-homoserine
  MOD_RES (31)..(31): optional, but when present one or more gamma glutamic acid residues

SEQ ID NO: 1909 - protein, 30 aa, Artificial Sequence
  OXM analog
HSQGTFTSDSSKYLDSRRAQDFVQWLMNTK

SEQ ID NO: 1910 - protein, 32 aa, Artificial Sequence
  OXM analog
  MOD_RES (2)..(2): Xaa=D-serine, Aib, Acb, Acx, Abu, D-Abu,  Aminovaleric acid (Nva), Cpa, Prg, Alg, 2-Cha, D-tbg, Vg, Acp, or Acpe
  MOD_RES (10)..(10): Xaa=Tyr or Lys
  MOD_RES (12)..(12): Xaa=Ser or Lys
  MOD_RES (16)..(16): Xaa=Ser, aib,  or Glu
  MOD_RES (17)..(17): Xaa=Arg or Glu
  MOD_RES (18)..(18): Xaa=Arg or Ala
  MOD_RES (20)..(20): Xaa=Glu or Lys
  MOD_RES (27)..(27): Xaa=Met, norleucine, methionine sulfoxide, or O-methyl-L-homoserine
  MOD_RES (31)..(31): Xaa=gamma-glutamic acid
  MOD_RES (32)..(32): Xaa=is optional but when present, it is gamma-glutamic acid
HXQGTFTSDXSXYLDXXXAXDFVQWLXNTKXX

SEQ ID NO: 1911 - protein, 31 aa, Artificial Sequence
  OXM analog
  MOD_RES (2)..(2): Xaa=D-serine
  MOD_RES (10)..(10): Xaa=Lys(gamma-glutamic acid-gamma-glutamic acid-palmitoyl)
  MOD_RES (16)..(16): Xaa=Aib
  MOD_RES (31)..(31): Xaa=gamma-glutamic acid
  MOD_RES (31)..(31): C-terminal amidation
HXQGTFTSDXSKYLDXRRAQDFVQWLMNTEX

SEQ ID NO: 1912 - protein, 31 aa, Artificial Sequence
  OXM analog
  MOD_RES (2)..(2): Xaa=D-serine
  MOD_RES (10)..(10): Xaa=Lys(gamma-glutamic acid-gamma-glutamic acid-palmitoyl)
  MOD_RES (16)..(16): Xaa=aib
  MOD_RES (30)..(30): Xaa=D-Lys
  MOD_RES (31)..(31): Xaa=gamma-glutamic acid
  MOD_RES (31)..(31): C-terminal amidation
HXQGTFTSDXSKYLDXRRAQDFVQWLMNTXX

SEQ ID NO: 1913 - protein, 31 aa, Artificial Sequence; identical to SEQ ID NO: 1895
  OXM analog
  MOD_RES (2)..(2): Xaa=D-serine
  MOD_RES (10)..(10): Xaa=Lys(gamma-glutamic acid-gamma-glutamic acid-palmitoyl)
  MOD_RES (31)..(31): Xaa=gamma-glutamic acid
  MOD_RES (31)..(31): C-terminal amidation

SEQ ID NO: 1914 - protein, 31 aa, Artificial Sequence; identical to SEQ ID NO: 1911
  OXM analog
  MOD_RES (2)..(2): Xaa=D-serine
  MOD_RES (10)..(10): Xaa=Lys(gamma-glutamic acid-gamma-glutamic acid-palmitoyl)
  MOD_RES (16)..(16): Xaa=aib
  MOD_RES (31)..(31): Xaa=gamma-D-glutamic acid

SEQ ID NO: 1915 - protein, 31 aa, Artificial Sequence; identical to SEQ ID NO: 1895
  OXM analog
  MOD_RES (2)..(2): Xaa=D-serine
  MOD_RES (10)..(10): Xaa=Lys(glutamic acid-glutamic acid-palmitoyl)
  MOD_RES (31)..(31): Xaa=gamma-glutamic acid
  MOD_RES (31)..(31): C-terminal amidation

SEQ ID NO: 1916 - protein, 31 aa, Artificial Sequence; identical to SEQ ID NO: 1895
  OXM analog
  MOD_RES (2)..(2): Xaa=D-serine
  MOD_RES (10)..(10): Xaa=Lys(Arg-Arg-palmitoyl)
  MOD_RES (31)..(31): Xaa=gamma-glutamic acid
  MOD_RES (31)..(31): C-terminal amidation

SEQ ID NO: 1917 - protein, 31 aa, Artificial Sequence; identical to SEQ ID NO: 1895
  OXM analog
  MOD_RES (2)..(2): Xaa=D-Serine
  MOD_RES (10)..(10): Xaa=Lys(homocysteic acid-homocysteic acid-palmitoyl)
  MOD_RES (31)..(31): Xaa=gamma-glutamic acid
  MOD_RES (31)..(31): C-terminal amidation

SEQ ID NO: 1918 - protein, 31 aa, Artificial Sequence; identical to SEQ ID NO: 1895
  OXM analog
  MOD_RES (2)..(2): Xaa=D-Serine
  MOD_RES (10)..(10): Xaa=Lys(D-glutamic acid-D-glutamic acid-palmitoyl)
  MOD_RES (31)..(31): Xaa=gamma-glutamic acid
  MOD_RES (31)..(31): C-terminal amidation

SEQ ID NO: 1919 - protein, 31 aa, Artificial Sequence
  OXM analog
  MOD_RES (2)..(2): Xaa=D-Serine
  MOD_RES (10)..(10): Xaa=Lys(gamma-glutamic acid-gamma-glutamic acid-myristoyl)
  MOD_RES (16)..(16): Xaa=aib
  MOD_RES (31)..(31): Xaa=gamma-glutamic acid
  MOD_RES (31)..(31): C-terminal amidation
HXQGTFTSDXSKYLDXRRAQDFVQWLMNTKX

SEQ ID NO: 1920 - protein, 31 aa, Artificial Sequence
  OXM analog
  MOD_RES (2)..(2): Xaa=D-Serine
  MOD_RES (10)..(10): Xaa=Lys(gamma-glutamic acid-gamma-glutamic acid-palmitoyl)
  MOD_RES (16)..(16): Xaa=aib
  MOD_RES (31)..(31): Xaa=gamma-glutamic acid
  MOD_RES (31)..(31): C-terminal amidation
HXQGTFTSDXSKYLDXRAAQDFVQWLMDTKX

SEQ ID NO: 1921 - protein, 31 aa, Artificial Sequence; identical to SEQ ID NO: 1919
  OXM analog
  MOD_RES (2)..(2): Xaa=D-Serine
  MOD_RES (10)..(10): Xaa=Lys(gamma-glutamic acid-gamma-glutamic acid-stearoyl)
  MOD_RES (16)..(16): Xaa=aib
  MOD_RES (31)..(31): Xaa=gamma-glutamic acid
  MOD_RES (31)..(31): C-terminal amidation

SEQ ID NO: 1922 - protein, 29 aa, Homo sapiens
SSSSKAPPPSLPSPSRLPGPSDTPILPQR

SEQ ID NO: 1923 - protein, 29 aa, Homo sapiens
SSSSRAPPPSLPSPSRLPGPSDTPILPQK

SEQ ID NO: 1924 - protein, 29 aa, Homo sapiens
  MISC_FEATURE (5)..(5): Xaa at position 5 is lysine or Arginine
  MISC_FEATURE (29)..(29): Xaa at position 29 is lysine or Arginine
SSSSXAPPPSLPSPSRLPGPSDTPILPQX

SEQ ID NO: 1925 - protein, 8 aa, Homo sapiens
GAGSSSRR

SEQ ID NO: 1926 - protein, 29 aa, Artificial Sequence
  glucagon analogue
  MISC_FEATURE (1)..(1): Xaa at position 1 = His, D-histidine, desaminohistidine, hydroxyl-histidine, acetyl-histidine, homo-histidine or alpha, alpha-dimethyl imidiazole acetic acid (DMIA), N-methyl histidine, alpha-methyl histidine, or imidazole acetic acid
  MISC_FEATURE (2)..(2): Xaa at position 2 = Ser, D-serine, Ala, D-alanine, Val, glycine, n-methyl serine, aminoisobutyric acid (AIB) or N-methyl alanine
  MISC_FEATURE (3)..(3): Xaa at position 3 is Gln, Glu, Orn or  Nle
  MISC_FEATURE (10)..(10): Xaa at position 10 = Tyr, Val or Trp
  MISC_FEATURE (12)..(12): Xaa at position 12 = Ser, Lys or Arg
  MISC_FEATURE (15)..(15): Xaa at position 15 = Asp, Glu, cysteic acid, homoglutamic acid and homocysteic acid
  MISC_FEATURE (16)..(16): Xaa at position 16 = Ser, Gly, Glu, Gln, homoglutamic acid or homocysteic acid
  MISC_FEATURE (17)..(17): Xaa at position 17 = Arg, Gln, Lys, Cys, Orn, homocycstein or acetyl phenylalanine
  MISC_FEATURE (18)..(18): Xaa at position 18 = Arg, Ala,Lys, Cys, Orn, homocycstein or acetyl phenylalanine
  MISC_FEATURE (20)..(20): Xaa at position 20 = Gln, Lys, arginine, ornithine or citrulline
  MISC_FEATURE (21)..(21): Xaa at position 21 = Gln, Glu, Asp, Lys, Cys, Orn, homocycstein or acetyl phenyalanine
  MISC_FEATURE (23)..(23): Xaa at position 23 is Val or Ile
  MISC_FEATURE (24)..(24): Xaa at position 24 = Ala, Gln, Glu, Lys, Cys, Orn, homocycstein or acetyl phenyalanine
  MISC_FEATURE (27)..(27): Xaa at position 27 = Met, Leu, Val or Nle
  MISC_FEATURE (28)..(28): Xaa at position 28 = Asn, Lys or Asp
  MISC_FEATURE (29)..(29): Xaa at position 29 is Thr, Gly, Lys, Cys, Orn, homocycstein or acetyl phenyalanine
XXXGTFTSDXSXYLXXXXAXXFXXWLXXX

SEQ ID NO: 1927 - protein, 41 aa, Homo sapiens
  MISC_FEATURE (2)..(2): Xaa at position 2 is aminoisobutyric acid
  MISC_FEATURE (40)..(40): Xaa at position 40 is  lysine acylated with a C16 acyl group via a gamma glutamic acid linker
HXEGTFTSDVSSYLEEQAAKEFIAWLVKGGPSSGAPPPSXC

SEQ ID NO: 1928 - protein, 29 aa, Artificial Sequence
  glucagon analogue
  MISC_FEATURE (1)..(1): Xaa at position 1 = His, D-histidine, desaminohistidine, hydroxyl-histidine, acetyl-histidine, homo-histidine or alpha, alpha-dimethyl imidiazole acetic acid (DMIA), N-methyl histidine, alpha-methyl histidine, or imidazole acetic acid
  MISC_FEATURE (2)..(2): Xaa at position 2 = Ser, D-serine, Ala, D-alanine, Val, glycine, n-methyl serine, aminoisobutyric acid (AIB) or N-methyl alanine
  MISC_FEATURE (3)..(3): Xaa at position 3 is Gln or Glu
  MISC_FEATURE (10)..(10): Xaa at position 10 is an amino acid, for example Lys, covalently attached to a C12 to C18 acyl or alkyl group
  MISC_FEATURE (12)..(12): Xaa at position 12 = Ile, or Lys
  MISC_FEATURE (15)..(15): Xaa at position 15 = Asp, or Glu
  MISC_FEATURE (16)..(16): Xaa at position 16 = Ser, Lys, Arg, or Glu
  MISC_FEATURE (17)..(17): Xaa at position 17 = Arg, or Gln
  MISC_FEATURE (18)..(18): Xaa at position 18 = Arg, or Ala
  MISC_FEATURE (20)..(20): Xaa at position 20 = Gln, Aib or Lys
  MISC_FEATURE (21)..(21): Xaa at position 21 = Glu, or Asp
  MISC_FEATURE (23)..(23): Xaa at position 23 is Val or Ile
  MISC_FEATURE (24)..(24): Xaa at position 24 = Ala, Gln, or Asn
  MISC_FEATURE (27)..(27): Xaa at position 27 = Met, Leu, or Val
  MISC_FEATURE (28)..(28): Xaa at position 28 = Ala, Asn, Lys or Asp
  MISC_FEATURE (29)..(29): Xaa at position 29 is Thr, or Gly
XXXGTFTSDXSXYLXXXXAXXFXXWLXXX

SEQ ID NO: 1929 - protein, 31 aa, Artificial Sequence
  glucagon analogue
  MISC_FEATURE (1)..(1): Xaa at position 1 = His, D-histidine, desaminohistidine, hydroxyl-histidine, acetyl-histidine, homo-histidine or alpha, alpha-dimethyl imidiazole acetic acid (DMIA), N-methyl histidine, alpha-methyl histidine, or imidazole acetic acid
  MISC_FEATURE (2)..(2): Xaa at position 2 = aminoisobutyric acid (AIB)
  MISC_FEATURE (3)..(3): Xaa at position 3 is  Glu, Ala, Leu, Ile, Nle, Val, NorVal, homoserine, Met, methionine sulfoxide, methionine sulfone, acetyl-Orn, acetyl-diaminobutanoic acid, or acetyl-Lys
  MISC_FEATURE (10)..(10): Xaa at position 10 is an amino acid, for example Lys, covalently attached to a C12 to C18 acyl or alkyl group
  MISC_FEATURE (15)..(15): Xaa at position 15 = Asp, or Glu
  MISC_FEATURE (16)..(16): Xaa at position 16 = Ser, His, Aib, Ala, Lys, or Glu
  MISC_FEATURE (17)..(17): Xaa at position 17 = Arg, His or Gln
  MISC_FEATURE (20)..(20): Xaa at position 20 = Gln, Ala, His, Aib or Lys
  MISC_FEATURE (21)..(21): Xaa at position 21 = Glu, or Asp
  MISC_FEATURE (27)..(27): Xaa at position 27 = Nle, Leu, or Ala
  MISC_FEATURE (28)..(28): Xaa at position 28 = Ala, Lys, Asp or Glu
  MISC_FEATURE (29)..(29): Xaa at position 29 is Ala, Aib, Val or Gly
  MISC_FEATURE (30)..(30): Xaa at position 30 is Ala or Gly
  MISC_FEATURE (31)..(31): Xaa at position 31is Ala, Arg or Lys
XXXGTFTSDXSKYLXXXAAXXFVQWLXXXXX

SEQ ID NO: 1930 - protein, 39 aa, Artificial Sequence; identical to SEQ ID NO: 757
  glucagon analogue
  MISC_FEATURE (2)..(2): Xaa at position 2 = aminoisobutyric acid (AIB)
  MISC_FEATURE (20)..(20): Xaa at position 20 = aminoisobutyric acid (AIB)

SEQ ID NO: 1931 - protein, 39 aa, Artificial Sequence
  glucagon analogue
  MISC_FEATURE (2)..(2): Xaa at position 2 = aminoisobutyric acid (AIB)
HXQGTFTSDYSKYLDERAAQDFVQWLLDGGPSSGAPPPS

SEQ ID NO: 1932 - protein, 39 aa, Artificial Sequence
  glucagon analogue
  MISC_FEATURE (2)..(2): Xaa at position 2 = aminoisobutyric acid (AIB)
HXEGTFTSDVSSYLEEQAAKEFIAWLVKGGPSSGAPPPS

SEQ ID NO: 1933 - protein, 40 aa, Artificial Sequence
  glucagon analogue
HSQGTFTSDYSKYLDSRRAQDFVQWLMNTGGPSSGAPPPS

SEQ ID NO: 1934 - protein, 39 aa, Artificial Sequence
  glucagon analogue
  MISC_FEATURE (2)..(2): Xaa at position 2 = aminoisobutyric acid (AIB)
  MISC_FEATURE (20)..(20): Xaa at position 20 = aminoisobutyric acid (AIB)
  MISC_FEATURE (39)..(39): C-terminal amide
YXEGTFISDYSIYLDRQAAXEFVNWLLAGGPSSGAPPPS

SEQ ID NO: 1935 - protein, 14 aa, Artificial Sequence
  Synthetic peptide
  MISC_FEATURE: Peptide fragment representing carboxy terminal 10 amino acids of Exendin-4 plus a C-terminal extension including a Lys at position 13 acylated with a C16 group
GGPSSGAPPPSCKC

SEQ ID NO: 1936 - protein, 28 aa, Artificial Sequence
  Synthetic peptide
  MOD_RES (1)..(1): Xaa is His, D-histidine, desaminohistidine, hydroxyl-histidine, acetyl-histidine, homo-histidine or alpha, alpha-dimethyl imidiazole acetic acid (DMIA) N-methyl histidine, alpha-methyl histidine, or imidazole acetic acid
  MOD_RES (2)..(2): Xaa is Ser, D-serine, Ala, Val, glycine, N-methyl serine or aminoisobutyric acid (AIB), N-methyl alanine or D-alanine
  MOD_RES (10)..(10): Xaa is valine, tyrosine or Lys acylated with C16 acyl group (K(rEC16)C)
XXEGTFTSDXSSYLEEQAAKEFIAWLVK

SEQ ID NO: 1937 - protein, 28 aa, Artificial Sequence
  Synthetic peptide
  MOD_RES (1)..(1): Xaa is His, D-histidine, desaminohistidine, hydroxyl-histidine, acetyl-histidine, homo-histidine or alpha, alpha-dimethyl imidiazole acetic acid (DMIA) N-methyl histidine, alpha-methyl histidine, or imidazole acetic acid
  MOD_RES (2)..(2): Xaa is Ser, D-serine, Ala, Val, glycine, N-methyl serine or aminoisobutyric acid (AIB), N-methyl alanine or D-alanine
  MOD_RES (18)..(18): Xaa is Ala or Arg
  MOD_RES (24)..(24): Xaa is Ala, Gln or Cys-PEG
XXQGTFTSDYSKYLDERXAKDFVXWLMN

SEQ ID NO: 1938 - protein, 39 aa, Homo sapiens; identical to SEQ ID NO: 521
  MOD_RES (29)..(29): C-terminal amidation

SEQ ID NO: 1939 - protein, 41 aa, Artificial Sequence; identical to SEQ ID NO: 1927
  Glucagon analogue
  MISC_FEATURE (2)..(2): Xaa is d-serine, alanine, glycine, n-methyl serine and aminoisobutyric acid
  MOD_RES (40)..(40): Xaa at 40 is a Lys acylated with C16 acyl group

SEQ ID NO: 1940 - protein, 39 aa, Artificial Sequence; identical to SEQ ID NO: 1932
  Glucagon analogue
  misc_feature (2)..(2): Xaa is amino isobutyric acid

SEQ ID NO: 1941 - protein, 38 aa, Artificial Sequence
  Glucagon analogue
HSQTFTSDYSKYLDSRRAQDFVQWLMTGGPSSGAPPPS

SEQ ID NO: 1942 - protein, 39 aa, Artificial Sequence; identical to SEQ ID NO: 1932
  glucagon analogue
  MISC_FEATURE (2)..(2): Xaa at position 2 is amino isobutyric acid

SEQ ID NO: 1943 - protein, 41 aa, Artificial Sequence
  glucagon analogue
  misc_feature (2)..(2): Xaa at position 2 is amino isobutyric acid
HXEGTFTSDVSSYLEEQAAKEFIAWLVKGGPSSGAPPPSKG

SEQ ID NO: 1944 - protein, 41 aa, Artificial Sequence; identical to SEQ ID NO: 1943
  glucagon analogue
  misc_feature (2)..(2): Xaa at position 2 is amino isobutyric acid

SEQ ID NO: 1945 - protein, 38 aa, Artificial Sequence
  glucagon analogue
  misc_feature (1)..(1): Xaa at position 2 is amino isobutyric acid
XEGTFTSDVSSYLEEQAAKEFIAWLVKGGPSSGAPPPS

SEQ ID NO: 1946 - protein, 39 aa, Artificial Sequence
  glucagon analogue
  misc_feature (2)..(2): Xaa at position 2 is amino isobutyric acid
HXEGTFTSDVSSYLEEQAAREFIAWLVRGGPSSGAPPPS

SEQ ID NO: 1947 - protein, 39 aa, Artificial Sequence; identical to SEQ ID NO: 1932
  glucagon analogue
  misc_feature (2)..(2): Xaa at position 2 is amino isobutyric acid

SEQ ID NO: 1948 - protein, 38 aa, Artificial Sequence
  glucagon analogue
HSQTFTSDYSKYLDSRRAQDFVQWLMNTGPSSGAPPPS

SEQ ID NO: 1949 - protein, 38 aa, Artificial Sequence
  glucagon analogue
  misc_feature (2)..(2): Xaa at position 2 is amino isobutyric acid
HXQTFTSDYSKYLDSRRAQDFVQWLMNTGPSSGAPPPS

SEQ ID NO: 1950 - protein, 38 aa, Artificial Sequence
  glucagon analogue
SQGTFTSDYSKYLDSRRAQDFVQWLMNTGPSSGAPPPS

SEQ ID NO: 1951 - protein, 39 aa, Artificial Sequence; identical to SEQ ID NO: 1932
  glucagon analogue
  misc_feature (2)..(2): Xaa at position 2 is amino isobutyric acid

SEQ ID NO: 1952 - protein, 39 aa, Artificial Sequence; identical to SEQ ID NO: 757
  glucagon analogue
  misc_feature (2)..(2): Xaa at position 2 is amino isobutyric acid
  misc_feature (20)..(20): Xaa at position 20 is amino isobutyric acid

SEQ ID NO: 1953 - protein, 40 aa, Artificial Sequence
  glucagon analogue
  misc_feature (2)..(2): Xaa at position 2 is amino isobutyric acid
  misc_feature (10)..(10): Lys acylated with a C16 fatty acyl group via gamma-Glu spacer
HXEGTFTSDKSSYLEEQAAKEFIAWLVKGGPSSGAPPPSG

SEQ ID NO: 1954 - protein, 41 aa, Artificial Sequence
  glucagon analogue
  misc_feature (2)..(2): Xaa at position 2 is amino isobutyric acid
  misc_feature (41)..(41): Lys acylated with a C16 fatty acyl group via gamma-Glu spacer
HXEGTFTSDVSSYLEEQAAKEFIAWLVKGGPSSGAPPPSGK

SEQ ID NO: 1955 - protein, 39 aa, Artificial Sequence; identical to SEQ ID NO: 1932
  glucagon analogue
  misc_feature (2)..(2): Xaa at position 2 is amino isobutyric acid

SEQ ID NO: 1956 - protein, 29 aa, Artificial Sequence
  glucagon analogue
  misc_feature (2)..(2): Xaa at position 2 is amino isobutyric acid
HXEGTFTSDVSSYLEEQAAKEFIAWLVKG

SEQ ID NO: 1957 - protein, 39 aa, Artificial Sequence
  glucagon analogue
  misc_feature (1)..(1): Xaa at position 1 is amino isobutyric acid
  misc_feature (39)..(39): Lys acylated with a C16 fatty acyl group via gamma-Glu spacer
XEGTFTSDVSSYLEEQAAKEFIAWLVKGGPSSGAPPPSK

SEQ ID NO: 1958 - protein, 40 aa, Artificial Sequence; identical to SEQ ID NO: 1953
  glucagon analogue
  misc_feature (2)..(2): Xaa at position 2 is amino isobutyric acid
  misc_feature (10)..(10): Lys acylated with a C16 fatty acyl group via gamma-Glu spacer

SEQ ID NO: 1959 - protein, 40 aa, Artificial Sequence; identical to SEQ ID NO: 744
  glucagon analogue
  misc_feature (2)..(2): Xaa at position 2 is amino isobutyric acid
  misc_feature (40)..(40): Lys acylated with a C16 fatty acyl group via gamma-Glu spacer

SEQ ID NO: 1960 - protein, 39 aa, Artificial Sequence; identical to SEQ ID NO: 1946
  glucagon analogue
  misc_feature (2)..(2): Xaa at position 2 is amino isobutyric acid

SEQ ID NO: 1961 - protein, 40 aa, Artificial Sequence
  glucagon analogue
  misc_feature (2)..(2): Xaa at position 2 is amino isobutyric acid
HXEGTFTSDVSSYLEEQAAREFIAWLVRGGPSSGAPPPSK

SEQ ID NO: 1962 - protein, 39 aa, Artificial Sequence
  glucagon analogue
  misc_feature (2)..(2): Xaa at position 2 is amino isobutyric acid
  misc_feature (39)..(39): Lys pegylated with 20K PEG
HXEGTFTSDVSSYLEEQAAREFIAWLVRGPSSGAPPPSK

SEQ ID NO: 1963 - protein, 40 aa, Artificial Sequence; identical to SEQ ID NO: 744
  glucagon analogue
  misc_feature (2)..(2): Xaa at position 2 is amino isobutyric acid
  misc_feature (40)..(40): Lys acylated with a C16 fatty acyl group via gamma-Glu spacer

SEQ ID NO: 1964 - protein, 42 aa, Artificial Sequence
  glucagon analogue
  misc_feature (2)..(2): Xaa at position 2 is amino isobutyric acid
YXEGTFISDYSIAMDKIHQQDFVNWLLAQKGKKNDWKHNITQ

SEQ ID NO: 1965 - protein, 40 aa, Artificial Sequence; identical to SEQ ID NO: 1961
  glucagon analogue
  misc_feature (2)..(2): Xaa at position 2 is amino isobutyric acid
  misc_feature (40)..(40): Lys pegylated with 10K PEG

SEQ ID NO: 1966 - protein, 40 aa, Artificial Sequence; identical to SEQ ID NO: 1961
  glucagon analogue
  misc_feature (2)..(2): Xaa at position 2 is amino isobutyric acid
  misc_feature (40)..(40): Lsy pegylated with 20K PEG

SEQ ID NO: 1967 - protein, 47 aa, Artificial Sequence
  glucagon analogue
GTNLSVPNPLGFFPDHQLDPAFRANSNNPDWDFNPNKDHWPEANKVG

SEQ ID NO: 1968 - protein, 47 aa, Artificial Sequence; identical to SEQ ID NO: 1967
  glucagon analogue
  MISC_FEATURE (1)..(1): N-terminal acylation with a C14 fatty acyl group

SEQ ID NO: 1969 - protein, 40 aa, Artificial Sequence
  glucagon analogue
  misc_feature (2)..(2): Xaa at position 2 is amino isobutyric acid
  misc_feature (10)..(10): Lys acylated with a C14 fatty acyl group via gamma-Glu spacer
  misc_feature (40)..(40): Lys pegylated with 20K PEG
HXEGTFTSDKSSYLEEQAAREFIAWLVRGGPSSGAPPPSK

SEQ ID NO: 1970 - protein, 40 aa, Artificial Sequence; identical to SEQ ID NO: 1969
  glucagon analogue
  misc_feature (2)..(2): Xaa at position 2 is amino isobutyric acid
  misc_feature (10)..(10): Lys acylated with a C16 fatty acyl group via gamma-Glu spacer
  misc_feature (40)..(40): Lys pegylated with 10K PEG

SEQ ID NO: 1971 - protein, 40 aa, Artificial Sequence; identical to SEQ ID NO: 1969
  glucagon analogue
  misc_feature (2)..(2): Xaa at position 2 is amino isobutyric acid
  misc_feature (10)..(10): Lys acylated with a C16 fatty acyl group via succinoly spacer

SEQ ID NO: 1972 - protein, 39 aa, Artificial Sequence; identical to SEQ ID NO: 1946
  glucagon analogue
  misc_feature (2)..(2): Xaa at position 2 is amino isobutyric acid

SEQ ID NO: 1973 - protein, 40 aa, Artificial Sequence; identical to SEQ ID NO: 1969
  glucagon analogue
  misc_feature (2)..(2): Xaa at position 2 is amino isobutyric acid
  misc_feature (10)..(10): Lys acylated with a C16 fatty acyl group via gamma-Glu spacer
  misc_feature (40)..(40): Lys pegylated with 20K PEG

SEQ ID NO: 1974 - protein, 40 aa, Artificial Sequence; identical to SEQ ID NO: 1961
  glucagon analogue
  misc_feature (2)..(2): Xaa at position 2 is amino isobutyric acid
  misc_feature (40)..(40): Lys pegylated with 20K PEG

SEQ ID NO: 1975 - protein, 40 aa, Artificial Sequence
  glucagon analogue
  misc_feature (2)..(2): Xaa at position 2 is amino isobutyric acid
  misc_feature (24)..(24): Lys pegylated with 20K PEG
  misc_feature (40)..(40): Lys pegylated with 20K PEG
HXEGTFTSDVSSYLEEQAAREFIKWLVRGGPSSGAPPPSK

SEQ ID NO: 1976 - protein, 40 aa, Artificial Sequence; identical to SEQ ID NO: 1975
  glucagon analogue
  misc_feature (2)..(2): Xaa at position 2 is amino isobutyric acid
  misc_feature (24)..(24): Lys pegylated with 10K PEG
  misc_feature (40)..(40): Lys pegylated with 10K PEG

SEQ ID NO: 1977 - protein, 40 aa, Artificial Sequence
  glucagon analogue
  MISC_FEATURE (40)..(40): Lys pegylated with 20K PEG
HSQGTFTSDYSIYLDSRRAQDFVQWLMNTGPSSGAPPPSK

SEQ ID NO: 1978 - protein, 40 aa, Artificial Sequence
  glucagon analogue
  misc_feature (2)..(2): Xaa at position 2 is amino isobutyric acid
  misc_feature (20)..(20): Xaa at position 20 is amino isobutyric acid
  misc_feature (40)..(40): Lys pegylated with 20K PEG
YXEGTFISDYSIYLDRQAAXEFVNWLLAGGPSSGAPPPSK

SEQ ID NO: 1979 - protein, 47 aa, Artificial Sequence
  glucagon analogue
  MISC_FEATURE (1)..(1): N-terminal acylation with a C14 fatty acyl group
GTNLSVPNPRGFFPDHQLDPAFRANSNNPDWDFNPNKDHWPEANKVG

SEQ ID NO: 1980 - protein, 40 aa, Artificial Sequence; identical to SEQ ID NO: 1961
  glucagon analogue
  misc_feature (2)..(2): Xaa at position 2 is amino isobutyric acid
  misc_feature (40)..(40): Lys pegylated with 10K PEG

SEQ ID NO: 1981 - protein, 40 aa, Artificial Sequence; identical to SEQ ID NO: 1961
  glucagon analogue
  misc_feature (2)..(2): Xaa at position 2 is amino isobutyric acid
  misc_feature (40)..(40): Lys pegylated with 20K PEG

SEQ ID NO: 1982 - protein, 41 aa, Artificial Sequence
  glucagon analogue
  misc_feature (2)..(2): Xaa at position 2 is amino isobutyric acid
  misc_feature (40)..(40): Lys pegylated with 10K PEG
HXEGTFTSDVSSYLEEQAAREFIAWLVRGGPSSGAPPPSKC

SEQ ID NO: 1983 - protein, 40 aa, Artificial Sequence
  glucagon analogue
  misc_feature (2)..(2): Xaa at position 2 is amino isobutyric acid
  misc_feature (30)..(30): Lys pegylated with 20K PEG
  misc_feature (40)..(40): Lys pegylated with 20K PEG
HXEGTFTSDVSSYLEEQAAREFIAWLVRGKPSSGAPPPSK

SEQ ID NO: 1984 - protein, 40 aa, Artificial Sequence; identical to SEQ ID NO: 1983
  glucagon analogue
  misc_feature (2)..(2): Xaa at position 2 is amino isobutyric acid
  misc_feature (30)..(30): Lys pegylated with 10K PEG
  misc_feature (40)..(40): Lys pegylated with 10K PEG

SEQ ID NO: 1985 - protein, 43 aa, Artificial Sequence
  glucagon analogue
  misc_feature (2)..(2): Xaa at position 2 is amino isobutyric acid
  misc_feature (20)..(20): Xaa at position 20 is amino isobutyric acid
  misc_feature (43)..(43): Lys pegylated with 20K PEG
YXEGTFISDYSIAMDRIHQXDFVNWLLAQRGRRNDWRHNITQK

SEQ ID NO: 1986 - protein, 40 aa, Artificial Sequence
  glucagon analogue
  misc_feature (2)..(2): Xaa at position 2 is amino isobutyric acid
  misc_feature (20)..(20): Xaa at position 20 is amino isobutyric acid
  misc_feature (40)..(40): Lys pegylated with 20K PEG
YXEGTFISDYSIAMDRIHQXDFVNWLLAGGPSSGAPPPSK

SEQ ID NO: 1987 - protein, 39 aa, Artificial Sequence; identical to SEQ ID NO: 758
  glucagon analogue
  misc_feature (2)..(2): Xaa at position 2 is amino isobutyric acid
  misc_feature (10)..(10): Lys acylated with a C16 fatty acyl group via gamma-Glu spacer
  misc_feature (20)..(20): Xaa at position 20 is amino isobutyric acid

SEQ ID NO: 1988 - protein, 40 aa, Artificial Sequence; identical to SEQ ID NO: 756
  glucagon analogue
  misc_feature (2)..(2): Xaa at position 2 is amino isobutyric acid
  misc_feature (20)..(20): Xaa at position 20 is amino isobutyric acid
  misc_feature (40)..(40): Lys acylated with a C16 fatty acyl group via gamma-Glu spacer

SEQ ID NO: 1989 - protein, 40 aa, Artificial Sequence
  glucagon analogue
  misc_feature (16)..(16): Xaa at position 16 is amino isobutyric acid
  misc_feature (40)..(40): Lys pegylated with 20K PEG
HSQGTFTSDYSIYLDXRRAQDFVQWLMNTGPSSGAPPPSK

SEQ ID NO: 1990 - protein, 40 aa, Artificial Sequence
  glucagon analogue
  misc_feature (16)..(16): Xaa at position 16 is amino isobutyric acid
  misc_feature (40)..(40): Lys pegylated with 20K PEG
HSQGTFISDYSIYLDXRRAQDFVQWLMNTGPSSGAPPPSK

SEQ ID NO: 1991 - protein, 39 aa, Artificial Sequence; identical to SEQ ID NO: 758
  glucagon analogue
  misc_feature (2)..(2): Xaa at position 2 is amino isobutyric acid
  misc_feature (10)..(10): Lys acylated with a C16 fatty acyl group via gamma-Glu spacer
  misc_feature (20)..(20): Xaa at position 20 is amino isobutyric acid

SEQ ID NO: 1992 - protein, 40 aa, Artificial Sequence
  glucagon analogue
  misc_feature (2)..(2): Xaa at position 2 is amino isobutyric acid
  misc_feature (10)..(10): Lys acylated with a C16 fatty acyl group via gamma-Glu spacer
HXEGTFTSDKSRYLDERAAQEFVAWLLDAGPSSGAPPPSK

SEQ ID NO: 1993 - protein, 40 aa, Artificial Sequence
  glucagon analogue
  misc_feature (2)..(2): Xaa at position 2 is amino isobutyric acid
  misc_feature (10)..(10): Lys acylated with a C16 fatty acyl group via gamma-Glu spacer
HXQGTFTSDKSRYLDERAAQDFVQWLLDAGPSSGAPPPSK

SEQ ID NO: 1994 - protein, 40 aa, Artificial Sequence
  glucagon analogue
  misc_feature (2)..(2): Xaa at position 2 is amino isobutyric acid
  misc_feature (10)..(10): Lys acylated with a C16 fatty acyl group via gamma-Glu spacer
HXQGTFTSDKSRYLDERAAQDFVQWLLDGGPSSGAPPPSK

SEQ ID NO: 1995 - protein, 40 aa, Artificial Sequence
  glucagon analogue
  misc_feature (2)..(2): Xaa at position 2 is amino isobutyric acid
  misc_feature (10)..(10): Lys acylated with a C16 fatty acyl group via gamma-Glu spacer
HXEGTFTSDKSRYLDERAAQDFVQWLLDGGPSSGAPPPSK

SEQ ID NO: 1996 - protein, 38 aa, Artificial Sequence
  glucagon analogue
  misc_feature (1)..(1): Xaa at position 2 is amino isobutyric acid
  misc_feature (9)..(9): Lys acylated with a C16 fatty acyl group via gamma-Glu spacer
  misc_feature (19)..(19): Xaa at position 2 is amino isobutyric acid
XEGTFTSDKSIYLDKQAAXEFVNWLLAGGPSSGAPPPS

SEQ ID NO: 1997 - protein, 40 aa, Artificial Sequence
  glucagon analogue
  MISC_FEATURE (40)..(40): Lys pegylated with 20K PEG
HSQGTFTSDYSRYLDSRRAQDFVQWLMNTGPSSGAPPPSK

SEQ ID NO: 1998 - protein, 39 aa, Artificial Sequence
  glucagon analogue
  misc_feature (2)..(2): Xaa at position 2 is amino isobutyric acid
  misc_feature (20)..(20): Lys acylated with a (miniPEG)2-gamma Glu spacer
HXEGTFTSDYSKYLDERAAKDFVQWLLEGGPSSGAPPPS

SEQ ID NO: 1999 - protein, 39 aa, Artificial Sequence
  glucagon analogue
  misc_feature (2)..(2): Xaa at position 2 is amino isobutyric acid
  misc_feature (10)..(10): Lys acylated with a (miniPEG)2-gamma Glu spacer
HXEGTFTSDKSKYLDERAAQDFVQWLLEGGPSSGAPPPS

SEQ ID NO: 2000 - protein, 40 aa, Artificial Sequence
  glucagon analogue
  misc_feature (2)..(2): Xaa at position 2 is amino isobutyric acid
  misc_feature (40)..(40): Lys acylated with a (miniPEG)2-gamma Glu spacer
HXEGTFTSDYSKYLDERAAQDFVQWLLEGGPSSGAPPPSK

SEQ ID NO: 2001 - protein, 39 aa, Artificial Sequence
  glucagon analogue
  misc_feature (2)..(2): Xaa at position 2 is amino isobutyric acid
HXEGTFTSDYSKYLDERAAQDFVQWLLEGGPSSGAPPPS

SEQ ID NO: 2002 - protein, 40 aa, Artificial Sequence; identical to SEQ ID NO: 756
  glucagon analogue
  misc_feature (2)..(2): Xaa at position 2 is amino isobutyric acid
  misc_feature (20)..(20): Xaa at position 20 is amino isobutyric acid
  misc_feature (40)..(40): Lys acylated with a (miniPEG)2-gamma Glu spacer

SEQ ID NO: 2003 - protein, 39 aa, Artificial Sequence; identical to SEQ ID NO: 758
  glucagon analogue
  misc_feature (2)..(2): Xaa at position 2 is amino isobutyric acid
  misc_feature (10)..(10): Lys acylated with a (miniPEG)2-gamma Glu spacer
  misc_feature (20)..(20): Xaa at position 20 is amino isobutyric acid

SEQ ID NO: 2004 - protein, 40 aa, Artificial Sequence; identical to SEQ ID NO: 756
  glucagon analogue
  misc_feature (2)..(2): Xaa at position 2 is amino isobutyric acid
  misc_feature (20)..(20): Xaa at position 20 is amino isobutyric acid
  misc_feature (40)..(40): Lys acylated with a (miniPEG)2-gamma Glu spacer

SEQ ID NO: 2005 - protein, 40 aa, Artificial Sequence; identical to SEQ ID NO: 756
  glucagon analogue
  misc_feature (2)..(2): Xaa at position 2 is amino isobutyric acid
  misc_feature (20)..(20): Xaa at position 20 is amino isobutyric acid
  misc_feature (40)..(40): Lys acylated with a C16 fatty acyl diacid group via gamma-Glu spacer

SEQ ID NO: 2006 - protein, 39 aa, Artificial Sequence; identical to SEQ ID NO: 758
  glucagon analogue
  misc_feature (2)..(2): Xaa at position 2 is amino isobutyric acid
  misc_feature (10)..(10): Lys acylated with a C16 fatty acyl diacid group via gamma-Glu spacer
  misc_feature (20)..(20): Xaa at position 20 is amino isobutyric acid

SEQ ID NO: 2007 - protein, 39 aa, Artificial Sequence; identical to SEQ ID NO: 757
  glucagon analogue
  misc_feature (2)..(2): Xaa at position 2 is amino isobutyric acid
  misc_feature (20)..(20): Xaa at position 20 is amino isobutyric acid

SEQ ID NO: 2008 - protein, 39 aa, Artificial Sequence
  glucagon analogue
  misc_feature (2)..(2): Xaa at position 2 is amino isobutyric acid
  misc_feature (10)..(10): Lys acylated with a C16 fatty acyl group via gamma-Glu spacer
HXEGTFTSDKSSYLEEQAAKEFVNWLLAGGPSSGAPPPS

SEQ ID NO: 2009 - protein, 39 aa, Artificial Sequence
  glucagon analogue
  misc_feature (2)..(2): Xaa at position 2 is amino isobutyric acid
  misc_feature (10)..(10): Lys acylated with a C16 fatty acyl group via gamma-Glu spacer
  misc_feature (20)..(20): Xaa at position 20 is amino isobutyric acid
YXEGTFISDKSIYLDKQAAXEFVNWLLAGGPSSGAPPPS

SEQ ID NO: 2010 - protein, 39 aa, Artificial Sequence; identical to SEQ ID NO: 758
  glucagon analogue
  misc_feature (2)..(2): Xaa at position 2 is amino isobutyric acid
  misc_feature (10)..(10): Lys acylated with a C16 fatty acyl group via gamma-Glu spacer
  misc_feature (20)..(20): Xaa at position 20 is amino isobutyric acid

SEQ ID NO: 2011 - protein, 39 aa, Artificial Sequence; identical to SEQ ID NO: 758
  glucagon analogue
  misc_feature (2)..(2): Xaa at position 2 is amino isobutyric acid
  misc_feature (10)..(10): Xaa at position 2 is amino isobutyric acid
  misc_feature (20)..(20): Xaa at position 20 is amino isobutyric acid

SEQ ID NO: 2012 - protein, 39 aa, Artificial Sequence; identical to SEQ ID NO: 758
  glucagon analogue
  misc_feature (2)..(2): Xaa at position 2 is amino isobutyric acid
  misc_feature (10)..(10): Lys acylated with a C16 fatty acyl group via gamma-Glu spacer
  misc_feature (20)..(20): Xaa at position 20 is amino isobutyric acid

SEQ ID NO: 2013 - protein, 39 aa, Artificial Sequence
  glucagon analogue
  misc_feature (2)..(2): Xaa at position 2 is amino isobutyric acid
  misc_feature (10)..(10): Lys acylated with a C16 fatty acyl group via gamma-Glu spacer
  misc_feature (20)..(20): Xaa at position 20 is amino isobutyric acid
HXEGTFTSDKSIYLDKQAAXEFVNWLLAGGPSSGAPPPS

SEQ ID NO: 2014 - protein, 39 aa, Artificial Sequence; identical to SEQ ID NO: 758
  glucagon analogue
  misc_feature (2)..(2): Xaa at position 2 is amino isobutyric acid
  misc_feature (10)..(10): Lys acylated with a C16 fatty acyl group via gamma-Glu spacer
  misc_feature (20)..(20): Xaa at position 20 is amino isobutyric acid

SEQ ID NO: 2015 - protein, 39 aa, Artificial Sequence; identical to SEQ ID NO: 2013
  glucagon analogue
  misc_feature (2)..(2): Xaa at position 2 is amino isobutyric acid
  misc_feature (10)..(10): Lys acylated with a C16 fatty acyl group via gamma-Glu spacer
  misc_feature (20)..(20): Xaa at position 20 is amino isobutyric acid

SEQ ID NO: 2016 - protein, 39 aa, Artificial Sequence; identical to SEQ ID NO: 758
  glucagon analogue
  misc_feature (2)..(2): Xaa at position 2 is amino isobutyric acid
  misc_feature (10)..(10): Lys acylated with a C18 fatty acyl group via gamma-Glu spacer
  misc_feature (20)..(20): Xaa at position 20 is amino isobutyric acid

SEQ ID NO: 2017 - protein, 39 aa, Artificial Sequence; identical to SEQ ID NO: 758
  glucagon analogue
  misc_feature (2)..(2): Xaa at position 2 is amino isobutyric acid
  misc_feature (10)..(10): Lys acylated with a C20 fatty acyl group via gamma-Glu spacer
  misc_feature (20)..(20): Xaa at position 20 is amino isobutyric acid

SEQ ID NO: 2018 - protein, 39 aa, Artificial Sequence; identical to SEQ ID NO: 758
  glucagon analogue
  misc_feature (2)..(2): Xaa at position 2 is amino isobutyric acid
  misc_feature (10)..(10): Lys acylated with a C16 fatty acyl group via gamma-Glu spacer
  misc_feature (20)..(20): Xaa at position 20 is amino isobutyric acid

SEQ ID NO: 2019 - protein, 40 aa, Artificial Sequence
  glucagon analogue
  misc_feature (2)..(2): Xaa at position 2 is amino isobutyric acid
  misc_feature (10)..(10): Lys acylated with a C18 fatty acyl group via gamma-Glu spacer
  misc_feature (20)..(20): Xaa at position 20 is amino isobutyric acid
YXEGTFTSDKSIYLDKQAAXEFVNWLLAGGPSSSGAPPPS

SEQ ID NO: 2020 - protein, 40 aa, Artificial Sequence; identical to SEQ ID NO: 756
  glucagon analogue
  misc_feature (2)..(2): Xaa at position 2 is amino isobutyric acid
  misc_feature (10)..(10): Lys acylated with a C20 fatty acyl group via gamma-Glu spacer
  misc_feature (20)..(20): Xaa at position 20 is amino isobutyric acid
  misc_feature (40)..(40): Lys acylated with a C20 fatty acyl group via gamma-Glu spacer

SEQ ID NO: 2021 - protein, 40 aa, Artificial Sequence
  glucagon analogue
  misc_feature (2)..(2): Xaa at position 2 is amino isobutyric acid
  misc_feature (20)..(20): Xaa at position 20 is amino isobutyric acid
  misc_feature (40)..(40): Lys acylated with a C20 fatty acyl group via gamma-Glu spacer
YXEGTFISDYSIYLDKQAAXEFVNWLLAGGPSSGAPPPSK

SEQ ID NO: 2022 - protein, 40 aa, Artificial Sequence; identical to SEQ ID NO: 2021
  glucagon analogue
  misc_feature (2)..(2): Xaa at position 2 is amino isobutyric acid
  misc_feature (20)..(20): Xaa at position 20 is amino isobutyric acid
  misc_feature (40)..(40): Lys acylated with a C16 fatty acyl group via gamma-Glu spacer

SEQ ID NO: 2023 - protein, 39 aa, Artificial Sequence
  glucagon analogue
  misc_feature (1)..(1): Xaa at position 2 is amino isobutyric acid
  misc_feature (10)..(10): Lys acylated with a miniPEG) gamma Glu-C18 diacid,
  misc_feature (19)..(19): Xaa at position 19 is amino isobutyric acid
  misc_feature (39)..(39): Lys acylated with a C16 fatty acyl group via gamma-Glu spacer
XEGTFTSDYSIYLDKQAAXEAVNWLLAGGPSSGAPPPSK

SEQ ID NO: 2024 - protein, 40 aa, Artificial Sequence; identical to SEQ ID NO: 744
  glucagon analogue
  misc_feature (2)..(2): Xaa at position 2 is amino isobutyric acid
  misc_feature (40)..(40): Lys acylated with a C16 fatty acyl group via gamma-Glu spacer

SEQ ID NO: 2025 - protein, 40 aa, Artificial Sequence
  glucagon analogue
  misc_feature (2)..(2): Xaa at position 2 is amino isobutyric acid
  misc_feature (20)..(20): Xaa at position 20 is amino isobutyric acid
  misc_feature (40)..(40): Lys acylated with a C16 fatty acyl group via gamma-Glu spacer
HXEGTFTSDVSSYLEKQAAXEFVNWLLAGGPSSGAPPPSK

SEQ ID NO: 2026 - protein, 40 aa, Artificial Sequence
  glucagon analogue
  misc_feature (2)..(2): Xaa at position 2 is amino isobutyric acid
  misc_feature (20)..(20): Xaa at position 20 is amino isobutyric acid
  misc_feature (40)..(40): Lys acylated with a C16 fatty acyl group via gamma-Glu spacer
HXEGTFTSDVSIYLDKQAAXEFVNWLLAGGPSSGAPPPSK

SEQ ID NO: 2027 - protein, 31 aa, Artificial Sequence; identical to SEQ ID NO: 700
  Insulin conjugate

SEQ ID NO: 2028 - protein, 29 aa, Artificial Sequence
  Insulin conjugate
HSQGTFTSDYSKYLDSRRAQDFVQWLMNT

SEQ ID NO: 2029 - protein, 41 aa, Artificial Sequence
  glucagon analogue
  misc_feature (2)..(2): Xaa at position 2 is amino isobutyric acid
  misc_feature (40)..(40): Xaa at position 40 can be pegylated (10 or 20kd), or acylated with C16 via a gamma glu linker
HXEGTFTSDVSSYLEEQAAREFIAWLVRGGPSSGAPPPSXC

SEQ ID NO: 2030 - protein, 40 aa, Artificial Sequence
  glucagon analogue
  misc_feature (2)..(2): Xaa at position 2 is amino isobutyric acid
  misc_feature (10)..(10): Xaa at position 40 can be pegylated (10 or 20kd), or acylated with C16 via a gamma glu linker
HXEGTFTSDXSSYLEEQAAREFIAWLVRGGPSSGAPPPSC

SEQ ID NO: 2031 - protein, 40 aa, Artificial Sequence
  glucagon analogue
  misc_feature (2)..(2): Xaa at position 2 is amino isobutyric acid
HXEGTFTSDVSSYLEEQAAREFIAWLVRGGPSSGAPPPSC

SEQ ID NO: 2032 - protein, 41 aa, Artificial Sequence; identical to SEQ ID NO: 2029
  glucagon analogue
  misc_feature (2)..(2): Xaa at position 2 is amino isobutyric acid
  misc_feature (10)..(10): Xaa at position 10 can be pegylated (10 or 20kd), or acylated with C16 via a gamma glu linker
  misc_feature (40)..(40): Xaa at position 40 can be pegylated (10 or 20kd), or acylated with C16 via a gamma glu linker

SEQ ID NO: 2033 - protein, 40 aa, Artificial Sequence
  Glucagon analogue
  misc_feature (2)..(2): Xaa can be any naturally occurring amino acid
HXEGTFTSDVSSYLEEQAAKEFIAWLVKGGPSSGAPPPSC

SEQ ID NO: 2034 - protein, 41 aa, Artificial Sequence
  glucagon analogue
  misc_feature (2)..(2): Xaa at position 2 is amino isobutyric acid
  misc_feature (10)..(10): Lys acylated with a C16 fatty acyl group via gamma-Glu spacer
HXEGTFTSDKSSYLEEQAAKEFIAWLVKGGPSSGAPPPSGC

SEQ ID NO: 2035 - protein, 42 aa, Artificial Sequence
  glucagon analogue
  misc_feature (2)..(2): Xaa at position 2 is amino isobutyric acid
  misc_feature (41)..(41): Lys acylated with a C16 fatty acyl group via gamma-Glu spacer
HXEGTFTSDVSSYLEEQAAKEFIAWLVKGGPSSGAPPPSGKC

SEQ ID NO: 2036 - protein, 6 aa, Artificial Sequence
  model synthetic peptide
  MOD_RES (6)..(6): AMIDATION
HSRGTF

SEQ ID NO: 2037 - protein, 39 aa, Artificial Sequence
  glucagon analogue
  misc_feature (1)..(1): Xaa at position 1 is His or Tyr
  misc_feature (2)..(2): Xaa at position 2 is amino isobutyric acid
  misc_feature (10)..(10): Lys acylated with a C16-C20 fatty acyl group via gamma-Glu spacer
  misc_feature (20)..(20): Xaa at position 20 is amino isobutyric acid
XXEGTFTSDXSIYLDKQAAXEFVNWLLAGGPSSGAPPPS

SEQ ID NO: 2038 - protein, 40 aa, Artificial Sequence
  glucagon analogue
  misc_feature (1)..(1): Xaa at position 1 is His or Tyr
  misc_feature (2)..(2): Xaa at position 2 is amino isobutyric acid
  misc_feature (20)..(20): Xaa at position 20 is amino isobutyric acid
  misc_feature (40)..(40): Lys acylated with a C16-C20 fatty acyl group via gamma-Glu spacer
XXEGTFTSDVSIYLDKQAAXEFVNWLLAGGPSSGAPPPSX
